(19) United States
(12) Patent Application Publication
(10) Pub. No.: US 2007/0087406 A1
(43) Pub. Date: Apr. 19, 2007

(54) Isoforms of receptor for advanced glycation end products (RAGE) and methods of identifying and using same

(76) Inventors: Pei Jin, Palo Alto, CA (US); H. Michael Shepard, San Francisco, CA (US)

Correspondence Address: FISH & RICHARDSON, PC, P.O. BOX 1022, MINNEAPOLIS, MN, 55440-1022, US

(21) Appl. No.: 11/429,090

(22) Filed: May 4, 2006

Related U.S. Application Data
(60) Provisional application No. 60/678,076, filed on May 4, 2005.
(60) Provisional application No. 60/736,134, filed on Nov. 10, 2005.

(51) Int. Cl. A61K 38/17; C07K 14/705; C07H 21/04; C12P 21/06

(52) U.S. Cl. 435/69.1; 435/320.1; 435/325; 530/350; 536/23.5; 514/12

(57) ABSTRACT

Isoforms of RAGE and pharmaceutical compositions containing RAGE isoforms are provided. Methods for identifying and preparing RAGE isoforms are provided. Also provided are methods of treatment with the RAGE isoforms.

### RELATED APPLICATIONS

[0001] Benefit of priority is claimed to U.S. provisional application Ser. No. 60/678,076, to Pei Jin and H. Michael Shepard, filed May 4, 2005, entitled “ISOFORMS OF RECEPTOR FOR ADVANCED GLYCATION END PRODUCTS (RAGE) AND METHODS OF IDENTIFYING AND USING SAME,” and to U.S. provisional application Ser. No. 60/736,134, to Pei Jin, H. Michael Shepard, Cornelia Gorman, and Juan Zhang, filed Nov. 10, 2005, entitled “METHODS FOR PRODUCTION OF RECEPTOR AND LIGAND ISOFORMS.” The subject matter of each of these applications is incorporated by reference in its entirety.

[0002] This application is related to International PCT Application No. (Attorney Docket No. 17118-040W01/2821PC), filed May 4, 2006, entitled “ISOFORMS OF RECEPTOR FOR ADVANCED GLYCATION END PRODUCTS (RAGE) AND METHODS OF IDENTIFYING AND USING SAME” to Receptor Biologix, Pei Jin and H. Michael Shepard, which also claims priority to U.S. Provisional Application Ser. No. 60/678,076 and to U.S. Provisional Application Ser. No. 60/736,134.

[0003] This application also is related to U.S. application Ser. No. 11/129,740 to Pei Jin and H. Michael Shepard, entitled “CELL SURFACE RECEPTOR ISOFORMS AND METHODS OF IDENTIFYING AND USING SAME,” filed May 13, 2005, and to corresponding published International PCT application No WO 05/113596, published Dec. 1, 2005, which claim benefit to U.S. Provisional Application Ser. No. 60/666,825 to Pei Jin and H. Michael Shepard, filed Mar. 30, 2005; to U.S. Provisional Application Ser. No. 60/571,289, filed May 14, 2004, entitled “CELL SURFACE RECEPTOR ISOFORMS AND METHODS OF IDENTIFYING AND USING SAME,” to Pei Jin; and to U.S. Provisional Application Ser. No. 60/580,990, filed Jun. 18, 2004, entitled “CELL SURFACE RECEPTOR ISOFORMS AND METHODS OF IDENTIFYING AND USING SAME,” to Pei Jin. This application also is related to U.S. application Ser. No. 10/846,113, filed May 14, 2004, and to corresponding published International PCT application No. WO 05/016966, published Feb. 24, 2005.

[0004] The subject matter of each of the above-referenced related applications, international applications, provisional applications and published applications is incorporated by reference in its entirety.

### FIELD OF THE INVENTION

[0005] Isoforms of RAGE and pharmaceutical compositions containing isoforms of RAGE receptor are provided. Methods for identifying and preparing isoforms of RAGE receptors are provided. Also provided are methods of treatment with RAGE receptor isoforms.

### BACKGROUND

[0006] Molecules, including small molecules, proteins, lipids and other biological molecules can be altered during cell metabolism and accumulate in cells and tissues over time. In some cases, accumulations of altered molecules can be causative of pathological conditions and disease. In other cases, a disease or condition can result in altered molecule metabolism and lead to the accumulations of particular molecules in altered form and/or amount.

[0007] One example is the accumulation of proteins and lipids as glycalated products. The products, referred to as advanced glycation end products (AGEs), are the result of nonenzymatic glycation and oxidation of proteins and lipids in the presence of aldose sugars. Initial early products are formed as reversible Schiff bases and Amadori products. Molecular rearrangements thereof result in irreversible modifications to form AGEs. AGEs accumulate during the normal aging process in humans and AGE accumulation can be accelerated in particular diseases and conditions.

[0008] The accumulation of AGEs impact cell and tissue metabolism and signal transduction through their interactions with cellular binding proteins. One such binding protein is the receptor for advanced glycation end products (RAGE). RAGE interaction with AGEs is implicated in induction of cellular oxidant stress responses, including the RAS-MAP kinase pathway and NF-κB activation.

[0009] RAGE also binds to other molecules, including small molecules and proteins. S100A12 (also known as EN-RAGE, p6 and calgranulin C) is a calcium binding protein that can act as a ligand for RAGE. RAGE also can interact with β-sheet fibrilar materials including amyloid β-peptides, Aβ, amylin, serum amyloid A and prion-derived peptides. Amphoterin, a heparin-binding neurite outgrowth promoting protein also is a ligand for RAGE. Each of these ligand interactions can affect signal transduction pathways. Diseases and disorders can involve disregulation of and/or changes in the modulation of signal transduction pathways Binding of these ligands to RAGE leads to cellular activation mediated by receptor-dependent signaling to thereby mediate or participate in a variety of diseases and disorders, such as diabetic complications, amyloidoses, inflammatory/immune disorders and tumors.

[0010] A goal of drug development is to restore more normal regulation in the signal transduction pathway by targeting such pathways. Because of the involvement of RAGE receptors in a variety of signal transduction pathways that can affect diseases and pathological conditions, RAGE receptors are targets for therapeutic treatments and intervention. Accordingly, among the objects herein, it is an object to provide such therapeutics, methods for identifying or discovering candidate therapeutics, and use of the therapeutics for treatment of disease and disorders.

### SUMMARY

[0011] Provided herein are therapeutics that target RAGE receptors and activities. In particular, provided are RAGE isoforms. The RAGE isoforms can modulate the activity of RAGE by interacting with RAGE as a ligand and/or by interacting with RAGE ligands and/or by other mechanisms. Methods of treating RAGE-related disorders and antigiogenic-related disorders are provided.

[0012] Hence, provided herein are Receptor for Advanced Glycation Endproducts (RAGE) isoforms. The RAGE isoforms include isoforms that have a V-type Ig-like domain and are modified to have a deletion and/or insertion of one or more amino acids of the second C-type Ig-like domain and a deletion and/or insertion of one or amino acids of the transmembrane domain. Included are RAGE isoforms that exhibit a reduced or abolished membrane localization, particularly soluble isoforms. The isoforms include those that modulate the activity of a RAGE.

[0013] RAGE isoforms provided herein include those that contain a sequence of amino acids that has at least 70%, 75%, 80%, 85%, 90%, 95%, 96%, 97%, 98%, 99% or more sequence identity with a sequence of amino acids set forth in SEQ ID NO 10, or 75% 80%, 85%, 90%, 95%, 96%, 97%, 98%, 99% or more sequence identity with a sequence of amino acids set forth in SEQ ID NO. 11, or 86%, 88% 90%, 95%, 96%, 97%, 98%, 99% or more sequence identity with a sequence of amino acids set forth in SEQ ID NO. 12, or 90%, 91%, 92%, 93%, 94%, 95%, 96%, 97%, 98%, 99% or more sequence identity with a sequence of amino acids set forth in SEQ ID NO. 13, or 93%, 94%, 95%, 96%, 97%, 98%, 99% or more sequence identity with a sequence of amino acids set forth in SEQ ID NO. 14 or the recited sequence identity with an allelic or species variant of the isoform set forth in any of SEQ ID Nos. 10-14. Among the RAGE isoforms provided herein are those that include at least one Ig-like domain of RAGE and have a deletion of all of or part of the transmembrane domain so that they are not membrane localize. RAGE isoforms provided herein also include those that lack a signal sequence compared to RAGE. Also provided are RAGE isoforms that contain a signal sequence.

[0014] Provided herein are RAGE isoforms polypeptides that include amino acid residues having the sequences of amino acids set forth in any SEQ ID NOS: 10-14 and an allelic and species variants thereof. Allelic variants include, for example, those that contain a sequence of amino acids with one or more amino acid variation as set forth in SEQ ID NO. 4. Also provided are RAGE isoforms that contain the same number of amino acids as set forth in any of SEQ ID NOS: 10-14.

[0015] Provided herein are RAGE isoforms that modulate the function or activity of the RAGE receptor. A modulated activity of the RAGE receptor includes, for example, any selected from among ligand binding, competition with RAGE for ligand binding, ligand endocytosis, regulation of gene expression, signal transduction, interaction with a signal transduction molecule, membrane association and membrane localization.

[0016] Among the isoforms of RAGE provided herein are those that contain an intron-encoded sequence of amino acids from the gene encoding the RAGE receptor (referred to as intron fusion proteins). The intron-encoded portion can be at either terminus or internally located in the polypeptide Provided, for example, are RAGE isoform polypeptides that contain at least one domain of the RAGE receptor operatively linked to at least one amino acid encoded by an intron of a gene encoding the RAGE receptor or those in which the intron-encoded portion is a stop codon resulting in a truncation at the exon-intron junction.

[0017] Provided herein are RAGE isoforms encoded by a sequence of nucleotides set forth in any of SEQ ID NOS: 5-9 and allelic and species variants thereof. Exemplary of the allelic variants are those encoded by a sequence of nucleotides set forth in SEQ ID NO. 3. Also provided are RAGE isoform that contain amino acids encoded by all or part of an intron, including those in which the intron portion contains only a stop codon such that the nucleic acid molecule encodes an open reading frame that spans an exon intron junction and the open reading frame terminates at the stop codon in the intron. Typically the intron encodes one or more amino acids of the encoded RAGE isoforms described herein. In another embodiment, the stop codon is the first codon of the intron.

[0018] Provided herein are pharmaceutical compositions including any of the RAGE isoforms provided herein. The pharmaceutical composition can contain an amount of the isoform effective for modulating an activity of a cell surface receptor. In a particular embodiment, the cell surface receptor is RAGE. The modulated activity of the RAGE receptor, for example, is selected from among ligand binding, competition with RAGE for ligand binding, ligand endocytosis, regulation of gene expression, signal transduction, interaction with a signal transduction molecule, membrane association and membrane localization. The modulated activity of the RAGE receptor can be an inhibition of any activity or an enhancement of an activity. In general it is desired to inhibit the activity of RAGE to thereby inhibit any associated pathways an consequent diseases and disorders. Also provided herein, is a composition where the isoform of the composition complexes with RAGE.

[0019] Provided herein are nucleic acid molecules encoding the RAGE isoforms provided herein. Among these are nucleic acid molecules having a sequence of nucleic acids set forth in SEQ ID NOS. 5-9 and allelic and species variants thereof. Also provided herein are plasmids vectors containing the nucleic acid molecules. Vectors include mammalian viral vectors. Vectors can be those that remain episomal or integrates into the chromosome of a cell into which they are introduced. Vectors also include artificial chromosomes and other replicating elements. Also provided are cells, prokaryotic and eukaryotic, containing a vector as described herein. Vectors also include artificial chromosomes and other replicating elements. Also provided are pharmaceutical compositions containing the nucleic acid molecules as well as the plasmids and vectors and/or cells. Such compositions can be used in ex vivo and in vivo methods for delivery of genes and gene products to an organism.

[0020] Provided herein are methods of treating a disease or condition by administering any of the pharmaceutical compositions. Diseases treated include any in which RAGE and ligands therefor play a role, such as inflammatory and immune disorders. Exemplary diseases include, but are not limited to, diabetes, diabetes related conditions, cancers, inflammatory diseases, angiogenesis-related conditions, cell proliferation-related conditions, immune disorders, kidney disease, ocular disease, endometriosis, periodontal disease and neurodegenerative disease. Additionally, the disease or condition includes, but is not limited to, rheumatoid arthritis, osteoarthritic arthritis, multiple sclerosis, Alzheimer's disease and other neurodegenerative diseases and diseases of protein aggregation, Creutzfeldt-Jakob disease, Huntington's disease, posterior intraocular inflammation, uveitic disorders, ocular surface inflammatory disorders, macular degeneration, neovascular disease, proliferative vitreoretinopathy, atherosclerosis, type I diabetes, and chronic kidney disease. In a particular embodiment, the disease is an angiogenesis-related disease.

[0021] Exemplary of diseases treated are diabetic retinopathies and/or neuropathies and other inflammatory vascular complications of diabetes, autoimmune diseases, including autoimmune diabetes, atherosclerosis, Crohn's disease, diabetic kidney disease, cystic fibrosis, endometriosis, diabetes-induced vascular injury, inflammatory bowel disease. The RAGE isoforms can be used to inhibit tumor invasion or metastasis of a tumor.

[0022] In one embodiment, the diabetes-associated condition includes periodontal disease, autoimmune disease, vascular disease, tubulointerstitial disease, atherosclerosis and vascular disease associated with wound healing. In another embodiment, the cancer disease or condition includes carcinoma, lymphoma, blastoma, sarcoma, leukemia, lymphoid malignancies, squamous cell cancer, lung cancer including small-cell lung cancer, non-small cell lung cancer, adenocarcinoma of the lung and squamous carcinoma of the lung, cancer of the peritoneum, hepatocellular cancer, gastrointestinal cancer, pancreatic cancer, glioblastoma, cervical cancer, ovarian cancer, liver cancer, bladder cancer, hepatoma, breast cancer, colon cancer, rectal cancer, colorectal cancer, endometrial/uterine carcinoma, salivary gland carcinoma, renal cancer, prostate cancer, vulval cancer, thyroid cancer, hepatic carcinoma, anal carcinoma, penile carcinoma, and head and neck cancer.

[0023] Provided herein is a conjugates that contain a RAGE isoform. The conjugates include a RAGE isoforms linked directly or via a linker to another molecule, such as a biomolecule or macromolecule, such as serum albumin, a drug, an other receptor isoforms or portion thereof,

[0024] Provided herein are chimeric polypeptides (or conjugates) that contain all or at least one domain of a RAGE isoform and all or at least one domain of a different RAGE isoform or of another cell surface receptor isoform. In one embodiment, the cell surface receptor isoform is an intron fusion protein. In another embodiment, the polypeptide contains all or at least one domain of a RAGE isoform and an intron-encoded portion of a cell surface receptor isoform. Provided herein are polypeptides containing a domain of RAGE linked directly or indirectly to serum albumin. In one embodiment, the RAGE isoform is an intron fusion protein and the domain is the intron portion. Also provided are chimeric conjugates that contain two or more isoforms described herein, including the RAGE isoforms and other receptor isoforms. The components of the chimeras and conjugates can be linked via peptide bonds, other covalent linkages, such as hydrogen bonding, van der waals forces and other such interactions, such as those responsible for antigen/antibody interactions, ligand bonding and other such interactions. Linkage can be direct or indirect via one or more linkers.

[0025] Provided herein is a combination that includes one or more of the RAGE isoforms as described herein and one or more other cell surface receptor and/or a therapeutic drug. In one embodiment, the isoforms and/or drugs in the combination are in separate compositions or in a single composition.

[0026] Provided herein are methods of treatment that include administering a chimeric polypeptide that contains all or at least one domain of a RAGE isoform and all or at least one domain of a different RAGE isoform or of another cell surface receptor isoform. In one embodiment, each component is administered separately, simultaneously, intermittently, in a single composition or combinations thereof.

[0027] Provided herein are pharmaceutical compostions that contain a nucleic acid molecule including a nucleic acid encoding a RAGE isoform provided herein.

[0028] Provided herein are pharmaceutical compositions that contain a nucleic acid molecule including a nucleic acid molecule encoding a RAGE isoform. Also provided area pharmaceutical compositions that contain nucleic acid molecules encoding RAGE isoforms that contains an intron and an exon (an intron fusion protein).

[0029] Also provided are therapeutic methods that include administering a pharmaceutical composition provided herein that contains nucleic acid encoding a RAGE isoform or portion thereof. The composition can be introduced into a cell that has been removed from a host animal and reintroduced into the same animal or an animal compatible or treated to be compatible with the cells. In another embodiment, the composition is introduced into an animal. In a particular embodiment, the animal is a human.

### BRIEF DESCRIPTION OF THE FIGURES

[0030] FIG. 1 depicts angiogenic and endothelial cell maintenance pathways. The figure depicts the targets for AGEs, which act via interaction with RAGE. Hence, target points for modulation of these pathways by RAGE isoforms are indicated.

### DETAILED DESCRIPTION

Outline

[0031] A. DEFINITIONS

[0032] B. Receptor for Advanced Glycation Endproducts
[0033] 1. RAGE

[0034] C. RAGE Receptor Isoforms
[0035] 1. Identification and production of RAGE isoforms
   [0036] a. Alternative Splicing and Generation of RAGE Isoforms
      [0037] i. Isoforms generated by intron modification
      [0038] ii. Isoforms generated by exon modifications
   [0039] b. In silico generated RAGE isoforms
[0040] 2. RAGE Isoform Polypeptide Structure
[0041] 3. RAGE isoform biological activities
   [0042] a. Negatively acting and inhibitory isoforms

[0043] D. Methods for identifying and generating RAGE isoforms

[0044] E. Exemplary RAGE isoforms
[0045] 1. Allelic Variants of Isoforms

[0046] F. Methods of Producing Nucleic Acid Encoding RAGE Isoforms and Methods of Producing

[0047] RAGE Polypeptides
[0048] 1. Synthetic genes and polypeptides
[0049] 2. Methods of cloning and isolating RAGE isoforms
[0050] 3. Expression Systems
   [0051] a. Prokaryotic expression
   [0052] b. Yeast
   [0053] c. Insect Cells
   [0054] d. Mammalian cells
   [0055] e. Plants

[0056] G. Isoform Conjugates
[0057] 1. Isoform Fusions
   [0058] a. RAGE Isoform Fusions for Improved Production of RAGE Isoform Polypeptides
      [0059] i. Tissue Plasminogen Activator
      [0060] ii. tPA-RAGE Isoform Fusions
   [0061] b. Chimeric and synthetic RAGE isoform polypeptides including homo- and heteromultimeric polypeptides
   [0062] c. Methods of Generating and Cloning RAGE Fusions
[0063] 2. Targeting Agent/Targeting Agent Conjugates
[0064] 3. Peptidomimetic isoforms

[0065] H. Assays to assess or monitor RAGE isoform activities
[0066] 1. Ligand Binding Assays and RAGE binding assays
[0067] 2. Complexation
[0068] 3. Gene Expression Assays
[0069] 4. Cell Proliferation Assays
[0070] 5. ERK Phosphorylation Assays
[0071] 6. Cell Migration Assay
[0072] 7. Neurite Outgrowth
[0073] 8. Animal Models
   [0074] a. Diabetic vasculopathy
   [0075] b. Diabetic atherosclerosis
   [0076] c. Diabetic inflammatory bone loss
   [0077] d. Autoimmune diabetes

[0078] I. Preparation, Formulation and Administration of RAGE isoforms and RAGE isoform compositions

[0079] J. In Vivo Expression of RAGE isoforms and Gene Therapy
[0080] 1. Delivery of nucleic acids
   [0081] a. Vectors-episomal and integrating
   [0082] b. Artificial chromosomes and other non-viral vector delivery methods
   [0083] c. Liposomes and other encapsulated forms and administration of cells containing the nucleic acids
[0084] 2. In Vitro and Ex Vivo delivery
[0085] 3. Systemic, local and topical delivery

[0086] K. RAGE and Angiogenesis
[0087] 1. Angiogenesis and disease
[0088] 2. The angiogenic process
[0089] 3. Cell Surface receptors in Angiogenesis
[0090] 4. Cell Surface receptors in tumors
[0091] 5. RAGE and RAGE ligands in Angiogenesis
[0092] 6. RAGE isoforms and angiogenesis

[0093] L. Exemplary Treatments with RAGE isoforms
[0094] 1. Age-related macular degeneration
[0095] 2. Diabetes related diseases
   [0096] a. Vascular Disease
   [0097] b. Periodontal Disease
   [0098] c. Endometriosis
[0099] 3. Autoimmune Disease
[0100] 4. Neurodegenerative Disease
[0101] 5. Cardiovascular Disease
[0102] 6. Kidney Disease
[0103] 7. Arthritis
[0104] 8. Cancer
[0105] 9. Combination Therapies
[0106] 10. Evaluation of RAGE isoform activities

[0107] M. EXAMPLES

A. Definitions

[0108] Unless defined otherwise, all technical and scientific terms used herein have the same meaning as is commonly understood by one of skill in the art to which the invention(s) belong. All patents, patent applications, published applications and publications, GENBANK sequences, websites and other published materials referred to throughout the entire disclosure herein, unless noted otherwise, are incorporated by reference in their entirety. In the event that there is a plurality of definitions for terms herein, those in this section prevail. Where reference is made to a URL or other such identifier or address, it is understood that such identifiers can change and particular information on the internet can come and go, but equivalent information is known and can be readily accessed, such as by searching the internet and/or appropriate databases. Reference thereto evidences the availability and public dissemination of such information.

[0109] As used herein, a cell surface receptor is a protein that is expressed on the surface of a cell and typically includes a transmembrane domain or other moiety that anchors it to the surface of a cell. As a receptor it binds to ligands that mediate or participate in an activity of the cell surface receptor, such as signal transduction or ligand internalization. Cell surface receptors include, but are not limited to, single transmembrane receptors and G-protein coupled receptors. Receptor tyrosine kinases, such as growth factor receptors, also are among such cell surface receptors.

[0110] As used herein, Advanced glycation end products (AGE) are adducts formed by the non-enzymatic glycation or oxidation of macromolecules. AGE forms, for example, during aging and formation is accelerated under pathophysiologic states such as diabetes, Alzheimer's disease, renal failure, immune/inflammatory disorders and other diseases and disorders.

[0111] As used herein, RAGE refers to Receptor for Advanced Glycation Endoproducts (RAGE) that is named for its ability to bind AGE. RAGE is a multiligand receptor belonging to the immunoglobulin (Ig) superfamily. RAGE binds to other products, including amyloid β-peptide, S100/calgranulin family proteins, high mobility group B1 (HMGB1, also know as amphoterin) and leukocyte integrins. As an example, a human RAGE gene encodes a 404 amino acid residue (aa) type I transmembrane glycoprotein with a 22 aa signal peptide, a 319 aa extracellular domain containing an Ig-like V-type domain and two Ig-like C-type domains, a 21 aa transmembrane domain and a 40 aa cytoplasmic domain (see SEQ ID No: 2). The V-type domain and the cytoplasmic domain are important for ligand binding and for intracellular signaling, respectively. The RAGE gene is composed of 11 exons interrupted by 10 introns. An exemplary genomic sequence of RAGE is set forth as SEQ ID NO:325. Alternative splice variants of RAGE exist. For example, two alternative splice variants, lacking the V-type domain or the cytoplasmic tail, are known. Sequences of exemplary RAGE isoforms, including alternative splice variants of RAGE, are set forth in SEQ ID NOS: 292-305. RAGE includes allelic variants of RAGE, such as any one of the allelic variants of a RAGE polypeptide or nucleic acid, such as set forth in SEQ ID NOS: 3 and 4, respectively. RAGE is also found in different species, and thus includes species variants.

[0112] RAGE is highly expressed in the embryonic central nervous system. In adult tissues, RAGE is expressed at low levels in multiple tissues including endothelial and smooth muscle cells, mononuclear phagocytes, pericytes, microglia, neurons, cardiac myocytes and hepatocytes. The expression of RAGE is upregulated upon ligand interaction. Depending on the cellular context and interacting ligand, RAGE activation can trigger differential signaling pathways that affect divergent pathways of gene expression. RAGE activation modulates varied essential cellular responses (including inflammation, immunity, proliferation, cellular adhesion and migration) that contribute to cellular dysfunction associated with chronic diseases such as diabetes, cancer, amyloidoses and immune or inflammatory disorders and other proliferative and degenerative diseases, including neurodegenerative diseases and endometriosis. RAGE receptors are implicated in induction of cellular oxidant stress responses, including via the RAS-MAP kinase pathway and NF-κB activation.

[0113] As used herein, a domain refers to a portion (a sequence of three or more, generally 5 or 7 or more amino acids) of a polypeptide that is a structurally and/or functionally distinguishable or definable. For example, a domain includes those that can form an independently folded structure within a protein made up of one or more structural motifs (e.g. combinations of alpha helices and/or beta strands connected by loop regions) and/or that is recognized by virtue of a functional activity, such as kinase activity. A protein can have one, or more than one, distinct domain. For example, a domain can be identified, defined or distinguished by homology of the sequence therein to related family members, such as homology and motifs that define an extracellular domain. In another example, a domain can be distinguished by its function, such as by enzymatic activity, e.g. kinase activity, or an ability to interact with a biomolecule, such as DNA binding, ligand binding, and dimerization. A domain independently can exhibit a function or activity such that the domain independently or fused to another molecule can perform an activity, such as, for example proteolytic activity or ligand binding. A domain can be a linear sequence of amino acids or a non-linear sequence of amino acids from the polypeptide. Many polypeptides contain a plurality of domains. For example, RAGE typically includes three immunoglobulin-like domains, a membrane-spanning (transmembrane) domain and an intracellular domain. Those of skill in the art are familiar with such domains and can identify them by virtue of structural and/or functional homology with other such domains.

[0114] As used herein an Ig-like domain is a domain recognized as such by those of skill in the art and is a domain containing folds of beta strands forming a compact folded structure of two beta sheets stabilized by hydrophobic interactions and sandwiched together by an intra-chain disulfide bond. In one example, an Ig-like C-type domain contains seven beta strands arranged as four-strand plus three-strand so that four beta strands form one beta sheet and three beta strands form the second beta sheet. For example, RAGE contains two Ig-like C-type domain: the first Ig-like C-type domain corresponds to amino acids 124-221 of a RAGE polypeptide having an amino acid sequence set forth in SEQ ID NO:2, and the second Ig-like C-type domain corresponds to amino acids 227-317 of a RAGE polypeptide having an amino acid sequence set forth in SEQ ID NO:2. In another example, an Ig-like V-type domain contains nine beta strands arranged as four beta strands plus five beta strands (Janeway C. A. et al. (eds): Immunobiology—the immune system in health and disease, 5th edn. New York, Garland Publishing, 2001). For example, RAGE contains one V-type Ig-like domain corresponding to amino acids 23-116 of a RAGE polypeptide having a sequence of amino acids set forth in SEQ ID NO:2.

[0115] As used herein, an extracellular domain is the portion of the cell surface receptor that occurs on the surface of the receptor and include the ligand binding site(s). For example, the extracellular domain of a RAGE polypeptide corresponds to amino acids 1-342 of a RAGE polypeptide having a sequence of amino acids set forth in SEQ ID NO:2.

[0116] As used herein, a transmembrane domain spans the plasma membrane anchoring the receptor and generally includes hydrophobic residues. For example, a transmembrane domain corresponds to amino acids 342-363 of a RAGE polypeptide having a sequence of amino acids set forth in SEQ ID NO:2.

[0117] As used herein, a cytoplasmic domain is a domain that participates in signal transduction. For example, a cytoplasmic domain corresponds to amino acids 364-404 of a RAGE polypeptide having a sequence of amino acids set forth in SEQ ID NO:2.

[0118] As used herein, an isoform of RAGE (also referred to herein as a RAGE isoform), refers to a receptor that has an altered polypeptide structure compared to a full-length wildtype (predominant) form of the corresponding RAGE, such as for example, due to differences in the nucleic acid sequence and encoded polypeptide of the isoform compared to the corresponding protein. Generally a RAGE isoform provided herein lacks a domain or portion thereof (or includes insertions or both) sufficient to alter an activity, such as an enzymatic activity, or the structure compared to that of the cognate full-length receptor.

[0119] The RAGE isoforms generally lack all or a sufficient portion of the transmembrane domain of a RAGE (and also the cytoplasmic domain) so that the RAGE isoform is not membrane-anchored. In addition, the isoform lacks one or more other domains or portion thereof. Included are isoforms that contain insertions that result in an alteration of an activity of the receptor or that add an activity. In addition, among the RAGE isoforms provided herein are those that are intron-fusion proteins in that they include at least one, typically 2 or more amino acid residues, typically, although not necessarily, at the C-terminal end of the protein, that are encoded by an intron in the gene encoding the corresponding receptor. In some instances, the encoded amino acid can be a stop codon. By virtue of the differences in structure, one or more functions (an activity) also can be altered, eliminated, and/or added. For example, the cytoplasmic domain of RAGE is required for NF-κB-dependent transcription. Elimination thereof, eliminates this activity in a RAGE isoform.

[0120] Generally, when an activity is altered in an isoform, it is altered by at least 0.1, 0.5, 1, 2, 3, 4, 5, or 10 fold compared to a wildtype and/or predominant form of the receptor. Typically, an activity is altered 2, 5, 10, 20, 50, 100 or 1000 fold or more. Alteration of activity includes an enhancement or a reduction of activity. In one embodiment, an alteration of an activity is a reduction in an activity; the reduction can be at least 0.1 0.5 1, 2, 3, 4, 5, or 10 fold compared to a wildtype and/or predominant form of the receptor. Typically, an activity is reduced 5, 10, 20, 50, 100 or 1000 fold or more.

[0121] An isoform can include a receptor that is shortened or lengthened (with respect to the total length of amino acid sequence compared to a predominant and/or wildtype form of the receptor) or otherwise altered, including a deletion, insertion, amino acid replacement and/or combinations thereof compared to the amino acid sequence of a predominant and/or wildtype form of the receptor. Additions can include an additional domain, such as that encoded by an intron or a portion thereof in the gene encoded in the wildtype. The portion can be 1, 2, 3, 5, 10, 15, 20, 25, 30, 35, 40, 50, 60 or more amino acids. Generally the isoforms provided herein lack all or a sufficient portion of the transmembrane domain to preclude membrane anchoring. Also, the isoforms generally lack another domain and/or include an intron-encoded region.

[0122] Thus, provided are RAGE isoforms that typically lack all or part of the transmembrane domain and at least one other domain and/or include insertions, including all or portions of intron-encoded regions. The isoforms also generally are capable of modulating the activity of a RAGE.

[0123] The RAGE isoforms provided herein are from any species, including mammals, such as primates, particularly humans, and domesticated animals, including dogs, cats, and others, such as rodents and avian species. For purposes herein, a human RAGE isoform is an isoform that has a cognate human receptor that is encoded by a gene from a human tissue or human cell source.

[0124] A RAGE isoform can be produced by any method known in the art including isolation of isoforms expressed in cells, tissues and organisms, and by recombinant methods and by use of in silico and synthetic methods. Isoforms of cell surface receptors, including isoforms of RAGE, can be encoded by alternatively spliced RNAs transcribed from a RAGE gene. Such isoforms include exon deletion, exon extension, exon truncation and intron retention alternatively spliced RNAs.

[0125] As used herein, reference herein to modulating the activity of a RAGE means that a RAGE isoform interacts in some manner with the RAGE and an activity of the RAGE, such as ligand binding or other signal-transduction-related activity is altered.

[0126] As used herein, an exon refers to a sequence of nucleotides that is transcribed into RNA and is represented in a mature form of RNA, such as mRNA (messenger RNA), after splicing and other RNA processing. An mRNA contains one or more exons operatively linked. Exons can encode polypeptides or a portion of a polypeptide. Exons also can contain non-translated sequences for example, translational regulatory sequences. Exon sequences often are conserved and exhibit homology among gene family members.

[0127] As used herein, an intron refers to a sequence of nucleotides that is transcribed into RNA and is then typically removed from the RNA by splicing to create a mature form of an RNA, for example, an mRNA. Typically, introns are not incorporated into mature RNAs, nor are introns sequences or a portion thereof typically translated and incorporated into a polypeptide. Splice signal sequences, such as splice donors and acceptors, are used by the splicing machinery of a cell to remove introns from RNA. It is noteworthy that an intron in one splice variant can be an exon (i.e., present in the spliced transcript) in another variant. Hence, spliced mRNA encoding an intron fusion protein can include an exon(s) and introns.

[0128] As used herein, splicing refers to a process of RNA maturation where introns in the mRNA are removed and exons are operatively linked to create a messenger RNA (mRNA).

[0129] As used herein, alternative splicing refers to the process of producing multiple mRNAs from a gene. Alternate splicing can include operatively linking less than all the exons of a gene, and/or operatively linking one or more alternate exons that are not present in all transcripts derived from a gene.

[0130] As used herein, a gene refers to a sequence of nucleotides transcribed into RNA (introns and exons), including nucleotide sequence that encodes at least one polypeptide. A gene includes sequences of nucleotides that regulate transcription and processing of RNA. A gene also includes regulatory sequences of nucleotides such as promoters and enhancers, and translation regulation sequences. Genes also can include exons and introns.

[0131] As used herein, a cognate gene with reference to an encoded polypeptide provided herein refers to the gene sequence that encodes a predominant polypeptide and is the same gene as the particular isoform. For purposes herein a cognate gene can include a natural gene or a gene that is synthesized such as by using recombinant DNA techniques. Generally, the cognate gene also is a predominant form in a particular cell or tissue.

[0132] As used herein, a cognate polypeptide or receptor with reference to the isoforms provided herein refers to the receptor that is encoded by the same gene as the particular isoform. Generally, the cognate receptor also is a predominant form in a particular cell or tissue. For example, herstatin is encoded by a splice variant of the pre-mRNA which encodes p185-HER2 (erbb2 receptor). Thus, p185-HER2 is the cognate receptor for herstatin. For purposes herein, the cognate receptor is a RAGE receptor, generally the full-length or predominant form of RAGE.

[0133] As used herein, a wildtype form, for example, a wildtype form of a polypeptide, refers to a polypeptide that is encoded by a gene. Typically a wildtype form refers to a gene (or RNA or protein derived therefrom) without mutations or other modifications that alter function or structure; wildtype forms include allelic variation among and between species. For purposes herein, the wildtype form of RAGE is set forth in SEQ ID NO:2, and encoded by a sequence of nucleotides set forth in SEQ ID NO:1. The wildtype RAGE includes allelic or species variation, such as for example any one or more of the allelic variants set forth in SEQ ID NO: 3 and 4.

[0134] As used herein, a predominant form, for example, a predominant form of a polypeptide, refers to a polypeptide that is the major polypeptide produced from a gene. A “predominant form” varies from source to source. For example, different cells or tissue types can produce different forms of polypeptides, for example, by alternative splicing and/or by alternative protein processing. In each cell or tissue type, a different polypeptide can be a “predominant form.”

[0135] As used herein, a splice site refers to one or more nucleotides within the gene that participate in the removal of an intron and/or the joining of an exon. Splice sites include splice acceptor sites and splice donor sites.

[0136] As used herein, exon deletion refers to an event of alternative RNA splicing that produces a nucleic acid molecule that lacks at least one exon compared to an RNA encoding a wildtype or predominant form of a polypeptide.

[0137] As used herein, exon insertion, also referred as exon retention, refers to an event of alternative RNA splicing that produces a nucleic acid molecule that contains at least one exon not typically present in an RNA encoding a wildtype or predominant form of a polypeptide.

[0138] As used herein, exon extension refers to an event of alternative RNA splicing that produces a nucleic acid molecule that contains at least one exon that is greater in length (number of nucleotides contained in the exon) than the corresponding exon in an RNA encoding a wildtype or predominant form of a polypeptide. In some cases, as described further herein, an mRNA produced by exon extension encodes an intron fusion protein.

[0139] As used herein, exon truncation refers to an event of alternative RNA splicing that produces a nucleic acid molecule that contains a truncation or shortening of one or more exons such that the one or more exons are shorter in length (number of nucleotides) compared to a corresponding exon in an RNA encoding a wildtype or predominant form of a polypeptide.

[0140] As used herein intron retention refers to an event of alternative RNA splicing that produces a nucleic acid molecule that contains an intron or a portion thereof operatively linked to one or more exons. In some cases, as described further herein, an mRNA produced by intron retention encodes an intron fusion protein.

[0141] As used herein, an intron fusion protein refers to an isoform encoded by a nucleic acid molecule that includes at least one codon (including stop codons) from one or more introns resulting either in truncation of a polypeptide isoform at the end of an exon operatively linked to the intron-encoded portion, or in an addition of one, 2, 3, 4, 5, 8, 10, 15, 20, 25, 30, 35, 40, 45, 50, 55, 60, 65, 70, 75 and more amino acids encoded by an intron. Generally, an intron fusion protein is encoded by nucleic acids that contain one or more codons (with reference to the predominant or wildtype form of a protein), including stop codons, operatively linked to exon codons. The intron portion can be a stop codon, resulting in an intron fusion protein that ends at the exon intron junctions. The activity of an intron fusion protein typically is different from the predominant form of a polypeptide, generally by virtue of truncations, deletions and/or insertion due to the presence of the intron(s) encoded amino acid residues. Typically, such truncations or deletions results in an isoform that lacks one or more domain(s) or portion of one or more domain(s) resulting in an alteration of an activity of a receptor. The activity can be altered by the intron fusion protein directly, such as by interaction with the receptor, or indirectly by interacting with a receptor ligand or co-factor or other modulator of receptor activity. Intron fusion proteins can occur in cells and tissues and can be encoded by an alternatively spliced RNA. In addition, intron fusion proteins can be encoded by RNA molecules identified in silico by identifying potential splice sites and then produced by recombinant methods or they can be prepared synthetically. Typically, an intron fusion protein is shortened compared to a RAGE by the presence of one or more stop codons in an intron fusion protein-encoding RNA that are not present in the corresponding sequence of an RNA encoding a wildtype or predominant form of a corresponding RAGE polypeptide. Addition of amino acids and/or a stop codons can result in an intron fusion protein that differs in size and sequence from a wildtype or predominant form of a polypeptide.

[0142] As used herein, a polypeptide lacking all or a portion of a domain refers a polypeptide that has a deletion of one or more amino acids or all of the amino acids of a domain compared to a cognate polypeptide. Amino acids deleted in a polypeptide lacking all or part of a domain need not be contiguous amino acids within the domain of the cognate polypeptide. Polypeptides that lack all or a part of a domain can include the loss or reduction of an activity of the polypeptide compared to the biological activity of a cognate polypeptide, or loss of a structure in the polypeptide.

[0143] For example, if a cognate receptor has a transmembrane domain between amino acids 400-420, then a receptor isoform polypeptide lacking all or a part of the transmembrane domain can have a deletion of 1, 2, 3, 4, 5, 6, 7, 8, 9, 10, 11, 12, 13, 14, 15, 16, 17, 18, 19, 20 or more amino acids between amino acids corresponding to amino acid positions 400-420 of the cognate receptor. Generally the isoforms provided herein lack all or a sufficient portion of the transmembrane domain to be secreted such that they are not anchored in the membrane.

[0144] As used herein, a polypeptide comprising a domain refers to a polypeptide that contains a complete domain with reference to the corresponding domain of a cognate receptor. A complete domain is determined with reference to the definition of that particular domain within a cognate polypeptide. For example, a receptor isoform comprising a domain refers to an isoform that contains a domain corresponding to the complete domain as found in the cognate receptor. If a cognate receptor, for example, contains a transmembrane domain of 21 amino acids between amino acid positions 400-420, then a receptor isoform that comprises such transmembrane domain, contains a 21 amino acid domain that has substantial identity with the 21 amino acid domain of the cognate receptor. Substantial identity refers to a domain that can contain allelic variation and conservative substitutions as compared to the domain of the cognate receptor. Domains that are substantially identical do not have deletions, non-conservative substitutions or insertions of amino acids compared to the domain of the cognate receptor.

[0145] As used herein, an allelic variant or allelic variation references to a polypeptide encoded by a gene that differs from a reference form of a gene (i.e. is encoded by an allele). Typically the reference form of the gene encodes a wildtype form and/or predominant form of a polypeptide from a population or single reference member of a species. Typically, allelic variants, which include variants between and among species typically have at least 80%, 90% or greater amino acid identity with a wildtype and/or predominant form from the same species; the degree of identity depends upon the gene and whether comparison is interspecies or intraspecies. Generally, intraspecies allelic variants have at least about 80%, 85%, 90% or 95% identity or greater with a wildtype and/or predominant form, including 96%, 97%, 98%, 99% or greater identity with a wildtype and/or predominant form of a polypeptide.

[0146] As used herein, species variants refer to variants of the same polypeptide between and among species. Generally, interspecies variants have at least about 60%, 70%, 80%, 85%, 90%, or 95% identity or greater with a wildtype and/or predominant form from another species, including 96%, 97%, 98%, 99% or greater identity with a wildtype and/or predominant form of a polypeptide.

[0147] As used herein, modification in reference to modification of a sequence of amino acids of a polypeptide or a sequence of nucleotides in a nucleic acid molecule and includes deletions, insertions, and replacements of amino acids and nucleotides, respectively.

[0148] As used herein, an open reading frame refers to a sequence of nucleotides or ribonucleotides in a nucleic acid molecule that encodes a functional polypeptide or a portion thereof, typically at least about fifty amino acids. An open reading frame can encode a full-length polypeptide or a portion thereof. An open reading frame can be generated by operatively linking one or more exons or an exon and intron, when the stop codon is in the intron and all or a portion of the intron is in a transcribed mRNA.

[0149] As used herein, a polypeptide refers to two or more amino acids covalently joined. The terms “polypeptide” and “protein” are used interchangeably herein.

[0150] As used herein, truncation or shortening with reference to the shortening of a nucleic acid molecule or protein, refers to a sequence of nucleotides or ribonucleotides in a nucleic acid molecule or a sequence of amino acid residues in a polypeptide that is less than full-length compared to a wildtype or predominant form of the protein or nucleic acid molecule.

[0151] As used herein, a reference gene refers to a gene that can be used to map introns and exons within a gene. A reference gene can be genomic DNA or portion thereof, that can be compared with, for example, an expressed gene sequence, to map introns and exons in the gene. A reference gene also can be a gene encoding a wildtype or predominant form of a polypeptide.

[0152] As used herein, a family or related family of proteins or genes refers to a group of proteins or genes, respectively that have homology and/or structural similarity and/or functional similarity with each other.

[0153] As used herein, a premature stop codon is a stop codon occurring in the open reading frame of a nucleic acid molecule before the stop codon used to produce or create a full-length form of a protein, such as a wildtype or predominant form of a polypeptide. The occurrence of a premature stop codon can be the result of, for example, alternative splicing and mutation.

[0154] As used herein, an expressed gene sequence refers to any sequence of nucleotides transcribed or predicted to be transcribed from a gene. Expressed gene sequences include, but are not limited to, cDNAs, ESTs, and in silico predictions of expressed sequences, for example, based on splice site predictions and in silico generation of spliced sequences.

[0155] As used herein, an expressed sequence tag (EST) is a sequence of nucleotides generated from an expressed gene sequence. ESTs are generated by using a population of mRNA to produce cDNA. The cDNA molecules can be produced for example, by priming from the polyA tail present on mRNAs. cDNA molecules also can be produced by random priming using one or more oligonucleotides which prime cDNA synthesis internally in mRNAs. The generated cDNA molecules are sequenced and the sequences are typically stored in a database. An example of an EST database is dbEST found online at ncbi.nlm.nih.gov/dbEST. Each EST sequence is typically assigned a unique identifier and information such as the nucleotide sequence, length, tissue type where expressed, and other associated data is associated with the identifier.

[0156] As used herein, a kinase is a protein that is able to phosphorylate a molecule, typically a biomolecule, including macromolecules and small molecules. For example, the molecule can be a small molecule, or a protein. Phosphorylation includes auto-phosphorylation. Some kinases have constitutive kinase activity. Other kinases require activation. For example, many kinases that participate in signal transduction are phosphorylated. Phosphorylation activates their kinase activity on another biomolecule in a pathway. Some kinases are modulated by a change in protein structure and/or interaction with another molecule. For example, complexation of a protein or binding of a molecule to a kinase can activate or inhibit kinase activity.

[0157] As used herein, designated refers to the selection of a molecule or portion thereof as a point of reference or comparison. For example, a domain can be selected as a designated domain for the purpose of constructing polypeptides that are modified within the selected domain. In another example, an intron can be selected as a designated intron for the purpose of identifying RNA transcripts that include or exclude the selected intron.

[0158] As used herein, modulate and modulation refer to a change of an activity of a molecule, such as a protein. Exemplary activities include, but are not limited to, biological activities, such as signal transduction. Modulation can include an increase in the activity (i.e., up-regulation agonist activity) a decrease in activity (i.e., down-regulation or inhibition) or any other alteration in an activity (such as periodicity, frequency, duration, kinetics. Modulation can be context dependent and typically modulation is compared to a designated state, for example, the wildtype protein, the protein in a constitutive state, or the protein as expressed in a designated cell type or condition.

[0159] As used herein, inhibit and inhibition refer to a reduction in an activity relative to the uninhibited activity.

[0160] As used herein, a composition refers to any mixture. It can be a solution, a suspension, liquid, powder, a paste, aqueous, non-aqueous or any combination thereof.

[0161] As used herein, a combination refers to any association between or among two or more items. The combination can be two or more separate items, such as two compositions or two collections, can be a mixture thereof, such as a single mixture of the two or more items, or any variation thereof. The elements of a combination are generally functionally associated or related. A kit is a packaged combination that optionally includes instructions for use of the combination or elements thereof.

[0162] As used herein, a pharmaceutical effect refers to an effect observed upon administration of an agent intended for treatment of a disease or disorder or for amelioration of the symptoms thereof.

[0163] As used herein, angiogenesis refers to the formation of new blood vessels from existing ones; neovascularization refers to the formation of new vessels. Physiologic angiongenesis is tightly regulated and is essential to reproduction and embryonic development. During post natal and adult life, angiogenesis occurs in wound repair and in exercised muscle and is generally restricted to days or weeks. In contrast, pathologic angiogenesis (or aberrant angiogenesis) can be persistent for months or years supporting the growth of solid tumors and leukemias, for example. It provides a conduit for the entry of inflammatory cells into sites of chronic inflammation (e.g., Crohn's disease and chronic cystitis). It is the most common cause of blindness; it destroys cartilage in rheumatoid arthritis and contributes to the growth and hemorrhage of atherosclerotic plaques. It leads to intraperitoneal bleeding in endometriosis. Tumor growth is angiogenesis-dependent. Tumors recruit their own blood supply by releasing factors that stimulate angiogenesis. Such factors include, VEGF, FGF, PDGF, TGF-β, Tek, EPHA2, AGE and others (see, e.g., FIG. 1). AGE-RAGE interactions can elicit angiogenesis through transcriptional activation of the VEGF gene via NF-κB and AP-1 factors. VEGF is overproduced in a large number of human cancers, including breast, lung, colorectal.

[0164] As used herein, angiogenic diseases (or angiogenesis-related diseases) are diseases in which the balance of angiogenesis is altered or the timing thereof is altered. Angiogenic diseases include those in which an alteration of angiogenesis, such as undesirable vascularization, occurs. Such diseases include, but are not limited to cell proliferative disorders, including cancers, diabetic retinopathies and other diabetic complications, inflammatory diseases, endometriosis and other diseases in which excessive vascularization is part of the disease process, including those noted above. As noted, the AGE-RAGE interaction elicits angiogenesis through transcriptional activation of the vascular endothelial growth factor (VEGF) gene via NF-κB and AP-1 factors. Hence any disorder involving VEGF interactions with VEGFR is included.

[0165] As used herein, RAGE-related diseases are any in which RAGE is implicated in some aspect of the etiology, pathology or development thereof. Diseases, include, but are not limited to inflammatory and immune diseases, such as, diabetic retinopathies and/or neuropathies and other inflammatory vascular complications of diabetes, autoimmune diseases, including autoimmune diabetes, atherosclerosis, Crohn's disease, diabetic kidney disease, cystic fibrosis, endometriosis, diabetes-induced vascular injury, inflammatory bowel disease, Alzheimers disease and other neurodegenerative diseases, tumors and cancers.

[0166] As used herein, treatment means any manner in which the symptoms of a condition, disorder or disease or other indication, are ameliorated or otherwise beneficially altered.

[0167] As used herein therapeutic effect means an effect resulting from treatment of a subject that alters, typically improves or ameliorates the symptoms of a disease or condition or that cures a disease or condition. A therapeutically effective amount refers to the amount of a composition, molecule or compound which results in a therapeutic effect following administration to a subject.

[0168] As used herein, the term “subject” refers to an animals, including a mammal, such as a human being.

[0169] As used herein, a patient refers to a human subject.

[0170] As used herein, an activity refers to a function or functioning or changes in or interactions of a biomolecule, such as polypeptide. Exemplary, but not limiting of such activities are: complexation, dimerization, multimerization, receptor-associated kinase activity or other enzymatic or catalytic activity, receptor-associated protease activity, phosphorylation, dephosphorylation, autophosphorylation, ability to form complexes with other molecules, ligand binding, catalytic or enzymatic activity, activation including auto-activation and activation of other polypeptides, inhibition or modulation of another molecule's function, stimulation or inhibition of signal transduction and/or cellular responses such as cell proliferation, migration, differentiation, and growth, degradation, membrane localization, membrane binding, and oncogenesis. an activity can be assessed by assays described herein and by any suitable assays known to those of skill in the art, including, but not limited to in vitro assays, including cell-based assays, in vivo assays, including assays in animal models for particular diseases.

[0171] As used herein, complexation refers to the interaction of two or more molecules such as two molecules of a protein to form a complex. The interaction can be by noncovalent and/or covalent bonds and includes, but is not limited to, hydrophobic and electrostatic interactions, Van der Waals forces and hydrogen bonds. Generally, protein-protein interactions involve hydrophobic interactions and hydrogen bonds. Complexation can be influenced by environmental conditions such as temperature, pH, ionic strength and pressure, as well as protein concentrations.

[0172] As used herein, dimerization refers to the interaction of two molecules of the same type, such as two molecules of a receptor. Dimerization includes homodimerization where two identical molecules interact. Dimerization also includes heterodimerization of two different molecules, such as two subunits of a receptor and dimerization of two different receptor molecules. Typically, dimerization involves two molecules that interact with each other through interaction of a dimerization domain contained in each molecule.

[0173] As used herein, in silico refers to research and experiments performed using a computer. In silico methods include, but are not limited to, molecular modeling studies, biomolecular docking experiments, and virtual representations of molecular structures and/or processes, such as molecular interactions.

[0174] As used herein, biological sample refers to any sample obtained from a living or viral source or other source of macromolecules and biomolecules, and includes any cell type or tissue of a subject from which nucleic acid or protein or other macromolecule can be obtained. The biological sample can be a sample obtained directly from a biological source or to sample that is processed For example, isolated nucleic acids that are amplified constitute a biological sample. Biological samples include, but are not limited to, body fluids, such as blood, plasma, serum, cerebrospinal fluid, synovial fluid, urine and sweat, tissue and organ samples from animals and plants and processed samples derived thereform. Also included are soil and water samples and other environmental samples, viruses, bacteria, fungi algae, protozoa and components thereof.

[0175] As used herein, macromolecule refers to any molecule having a molecular weight from the hundreds up to the millions. Macromolecules include peptides, proteins, nucleotides, nucleic acids, and other such molecules that are generally synthesized by biological organisms, but can be prepared synthetically or using recombinant molecular biology methods.

[0176] As used herein, a biomolecule is any compound found in nature, or derivatives thereof. Exemplary biomolecules include but are not limited to: oligonucleotides, oligonucleosides, proteins, peptides, amino acids, peptide nucleic acids (PNAs), oligosaccharides and monosaccharides.

[0177] As used herein, the term “nucleic acid” refers to single-stranded and/or double-stranded polynucleotides such as deoxyribonucleic acid (DNA), and ribonucleic acid (RNA) as well as analogs or derivatives of either RNA or DNA. Also included in the term “nucleic acid” are analogs of nucleic acids such as peptide nucleic acid (PNA), phosphorothioate DNA, and other such analogs and derivatives or combinations thereof. Nucleic acid can refer to polynucleotides such as deoxyribonucleic acid (DNA) and ribonucleic acid (RNA). The term also includes, as equivalents, derivatives, variants and analogs of either RNA or DNA made from nucleotide analogs, single (sense or antisense) and double-stranded polynucleotides. Deoxyribonucleotides include deoxyadenosine, deoxycytidine, deoxyguanosine and deoxythymidine. For RNA, the uracil base is uridine.

[0178] As used herein, the term “polynucleotide” refers to an oligomer or polymer containing at least two linked nucleotides or nucleotide derivatives, including a deoxyribonucleic acid (DNA), a ribonucleic acid (RNA), and a DNA or RNA derivative containing, for example, a nucleotide analog or a “backbone” bond other than a phosphodiester bond, for example, a phosphotriester bond, a phosphoramidate bond, a phophorothioate bond, a thioester bond, or a peptide bond (peptide nucleic acid). The term “oligonucleotide” also is used herein essentially synonymously with “polynucleotide,” although those in the art recognize that oligonucleotides, for example, PCR primers, generally are less than about fifty to one hundred nucleotides in length.

[0179] Polynucleotides can include nucleotide analogs, include, for example, mass modified nucleotides, which allow for mass differentiation of polynucleotides; nucleotides containing a detectable label such as a fluorescent, radioactive, luminescent or chemiluminescent label, which allow for detection of a polynucleotide; or nucleotides containing a reactive group such as biotin or a thiol group, which facilitates immobilization of a polynucleotide to a solid support. A polynucleotide also can contain one or more backbone bonds that are selectively cleavable, for example, chemically, enzymatically or photolytically. For example, a polynucleotide can include one or more deoxyribonucleotides, followed by one or more ribonucleotides, which can be followed by one or more deoxyribonucleotides, such a sequence being cleavable at the ribonucleotide sequence by base hydrolysis. A polynucleotide also can contain one or more bonds that are relatively resistant to cleavage, for example, a chimeric oligonucleotide primer, which can include nucleotides linked by peptide nucleic acid bonds and at least one nucleotide at the 3′ end, which is linked by a phosphodiester bond or other suitable bond, and is capable of being extended by a polymerase. Peptide nucleic acid sequences can be prepared using well-known methods (see, for example, Weiler et al. Nucleic acids Res. 25: 2792-2799 (1997)).

[0180] As used herein, oligonucleotides refer to polymers that include DNA, RNA, nucleic acid analogues, such as PNA, and combinations thereof. For purposes herein, primers and probes are single-stranded oligonucleotides or are partially single-stranded oligonucleotides.

[0181] As used herein, primer refers to an oligonucleotide containing two or more deoxyribonucleotides or ribonucleotides, generally more than three, from which synthesis of a primer extension product can be initiated. Experimental conditions conducive to synthesis include the presence of nucleoside triphosphates and an agent for polymerization and extension, such as DNA polymerase, and a suitable buffer, temperature and pH.

[0182] As used herein, synthetic, with reference to, for example, a synthetic nucleic acid molecule or a synthetic gene refers to a nucleic acid molecule that is produced by recombinant methods and/or by chemical synthesis methods.

[0183] As used herein, production by recombinant means by using recombinant DNA methods means the use of the well-known methods of molecular biology for expressing proteins encoded by cloned DNA.

[0184] As used herein, “isolated,” with reference to molecule, such as a nucleic acid molecule, oligonucleotide, polypeptide or antibody, indicates that the molecule has been altered by the hand of man from how it is found in its natural environment. For example, a molecule produced by and/or contained within a recombinant host cell is considered “isolated.” Likewise, a molecule that has been purified, partially or substantially, from a native source or recombinant host cell, or produced by synthetic methods, is considered “isolated.” Depending on the intended application, an isolated molecule can be present in any form, such as in an animal, cell or extract thereof; dehydrated, in vapor, solution or suspension; or immobilized on a solid support.

[0185] As used herein, the term “vector” refers to a nucleic acid molecule capable of transporting another nucleic acid to which it has been linked. One type of vector is an episome, i.e., a nucleic acid capable of extra chromosomal replication. Vectors include those capable of autonomous replication and/or expression of nucleic acids to which they are linked. Vectors capable of directing the expression of genes to which they are operatively linked are referred to herein as “expression vectors.” In general, expression vectors often are in the form of “plasmids,” which are generally circular double stranded DNA loops that, in their vector form are not bound to the chromosome. “Plasmid” and “vector” are used interchangeably as the plasmid is the most commonly used form of vector. Other such other forms of expression vectors that serve equivalent functions and that become known in the art subsequently hereto.

[0186] As used herein, “transgenic animal” refers to any animal, generally a non-human animal, e.g., a mammal, bird or an amphibian, in which one or more of the cells of the animal contain heterologous nucleic acid introduced by way of human intervention, such as by transgenic techniques well known in the art. The nucleic acid is introduced into the cell, directly or indirectly by introduction into a precursor of the cell, by way of deliberate genetic manipulation, such as by microinjection or by infection with a recombinant virus. This molecule can be stably integrated within a chromosome, i.e., replicate as part of the chromosome, or it can be extrachromosomally replicating DNA. In the typical transgenic animals, the transgene causes cells to express a recombinant form of a protein.

[0187] As used herein, a reporter gene construct is a nucleic acid molecule that includes a nucleic acid encoding a reporter operatively linked to a transcriptional control sequences. Transcription of the reporter gene is controlled by these sequences. The activity of at least one or more of these control sequences is directly or indirectly regulated by another molecule such as a cell surface protein, a protein or small molecule involved in signal transduction within the cell. The transcriptional control sequences include the promoter and other regulatory regions, such as enhancer sequences, that modulate the activity of the promoter, or control sequences that modulate the activity or efficiency of the RNA polymerase. Such sequences are herein collectively referred to as transcriptional control elements or sequences. In addition, the construct can include sequences of nucleotides that alter translation of the resulting mRNA, thereby altering the amount of reporter gene product.

[0188] As used herein, “reporter” or “reporter moiety” refers to any moiety that allows for the detection of a molecule of interest, such as a protein expressed by a cell, or a biological particle. Typical reporter moieties include, include, for example, fluorescent proteins, such as red, blue and green fluorescent proteins (see, e.g., U.S. Pat. No. 6,232,107, which provides GFPs from Renilla species and other species), the lacZ gene from E. coli, alkaline phosphatase, chloramphenicol acetyl transferase (CAT) and other such well-known genes. For expression in cells, nucleic acid encoding the reporter moiety, referred to herein as a “reporter gene,” can be expressed as a fusion protein with a protein of interest or under to the control of a promoter of interest.

[0189] As used herein, the phrase “operatively linked” in reference to nucleic acid sequences generally means the nucleic acid molecules or segments thereof are covalently joined into one piece of nucleic acid such as DNA or RNA, whether in single or double stranded form. The segments are not necessarily contiguous, rather two or more components are juxtaposed so that the components are in a relationship permitting them to function in their intended manner. For example, segments of RNA (exons) can be operatively linked such as by splicing, to form a single RNA molecule. In another example, DNA segments can be operatively linked, whereby control or regulatory sequences on one segment control permit expression or replication or other such control of other segments. Thus, in the case of a regulatory region operatively linked to a reporter or any other polynucleotide, or a reporter or any polynucleotide operatively linked to a regulatory region, expression of the polynucleotide/reporter is influenced or controlled (e.g., modulated or altered, such as increased or decreased) by the regulatory region. For gene expression, a sequence of nucleotides and a regulatory sequence(s) are connected in such a way to control or permit gene expression when the appropriate molecular signal, such as transcriptional activator proteins, are bound to the regulatory sequence(s). Operative linkage of heterologous nucleic acid, such as DNA, to regulatory and effector sequences of nucleotides, such as promoters, enhancers, transcriptional and translational stop sites, and other signal sequences, refers to the relationship between such DNA and such sequences of nucleotides. For example, operative linkage of heterologous DNA to a promoter refers to the physical relationship between the DNA and the promoter such that the transcription of such DNA is initiated from the promoter by an RNA polymerase that specifically recognizes, binds to and transcribes the DNA in reading frame.

[0190] As used herein, the term “operatively linked” in reference to polypeptide sequences, for example, when used in the context of the phrase “at least one domain of a cell surface receptor operatively linked to at least one amino acid encoded by an intron of a gene encoding a cell surface receptor,” means that the amino acids of a domain from a cell surface receptor are covalently joined to amino acids encoded by an intron from a cell surface receptor gene. Hence, a polypeptide that contains at least one domain of a cell surface receptor operatively linked to at least one amino acid encoded by an intron of a gene encoding a cell surface receptor can be an intron fusion protein. It contains one or more amino acids that are not found in a wildtype or predominant form of the receptor. These one or more amino acids are encoded by an intron sequence of the gene encoding the cell surface receptor. Nucleic acids encoding such polypeptides can be produced when an intron sequence is spliced or otherwise covalently joined in-frame to an exon sequence that encodes a domain of a cell surface receptor. Translation of the nucleic acid molecule produced a polypeptide where the amino acid(s) of the intron sequence are covalently joined to a domain of the cell surface receptor.

[0191] As used herein, the phrase “generated from a nucleic acid” in reference to the generating of a polypeptide, such as an isoform and intron fusion protein, includes the literal generation of a polypeptide molecule and the generation of an amino acid sequence of a polypeptide from translation of the nucleic acid sequence into a sequence of amino acids.

[0192] As used herein, conjugate refers to the joining, pairing, or association of two or molecules. For example, two or more polypeptides (or fragments, domains, or active portions thereof) that are the same or different can be joined together, or a polypeptide (or fragment, domain, or active portion thereof) can be joined with a synthetic or chemical molecule or other moiety. The association of two or more molecules can be through direct linkage, such as joining of the nucleic acid sequence encoding one polypeptide with the nucleic acid sequence encoding another polypeptide, or can be indirect such us by noncovalent or covalent coupling of one molecule with another. For example, conjugation of two or more molecules or polypeptides can be achieved by chemical linkage.

[0193] As used herein, a chimeric polypeptide refers to a polypeptide that includes the amino acid sequence of all or part of one polypeptide and an amino acid sequence of all or part of another different polypeptide. The amino acid sequence of the different polypeptides can be linked directly or indirectly. A chimeric polypeptide encoded by a single nucleic acid sequence also is termed a fusion protein.

[0194] As used herein, a fusion protein refers to a protein created through recombinant DNA techniques and is achieved by operatively linking all or part of the nucleic acid sequence of one gene with all or part of the nucleic acid sequence of another gene. In some cases, a fusion can encode a chimeric protein containing two or more proteins or peptides.

[0195] As used herein, multimerization domain refers to a sequence of amino acids that promote stable interaction of a polypeptide molecule with another polypeptide molecule containing the same or different multimerization domain. Generally, a polypeptide is joined directly or indirectly to the multimerization domain. Exemplary multimerization domains include the immunoglobulin constant region (Fc), leucine zippers, hydrophobic regions, hydrophilic regions, compatible protein-protein interaction domains such as, but not limited to an R subunit of PKA and an anchoring domain (AD), a free thiol which forms an intermolecular disulfide bond between the chimeric molecules, and a protuberance-into-cavity (i.e. hole) and a compensatory cavity of identical or similar size.

[0196] As used herein, production with reference to a polypeptide refers to expression and recovery of expressed protein (or recoverable or isolatable expressed protein). Factors that can influence the production of a protein include the expression system and host cell chosen, the cell culture conditions, the secretion of the protein by the host cell, and ability to detect a protein for purification purposes. Production of a protein can be monitored by assessing the secretion of a protein, such as for example, into cell culture medium.

[0197] As used herein, “improved production” refers to an increase in the production of a polypeptide compared to production of a control polypeptide. For example, production of an isoform fusion protein is compared to a corresponding isoform that is not a fusion protein or that contains a different fusion. For example, the production of an isoform containing a tPA pre/prosequence can be compared to an isoform containing its endogenous signal sequence. Generally, production of a protein can be improved more than, about or at least 1, 1.5, 2, 3, 4, 5, 6, 7, 8, 9, or 10 fold and more. Typically, production of a protein can be improved by 5, 10, 20, 30, 40, 50 fold or more compared to a corresponding isoform that is not an isoform fusion or does not contain the same fusion.

[0198] As used herein, secretion refers to the process by which a protein is transported into the external cellular environment or, in the case of gram-negative bacteria, into the periplasmic space. Generally, secretion occurs through a secretory pathway in a cell, for example, in eukaryotic cells this involves the endoplasmic reticulum and golgi apparatus.

[0199] As used herein, a “precursor sequence” or “precursor peptide” or “precursor polypeptide” refers to a sequence of amino acids, that is processed, and that occurs at a terminus, typically at the amino terminus, of a polypeptide prior to processing or cleavage. The precursor sequence includes sequences of amino acids that affect secretion and/or trafficking of the linked polypeptide. The precursor sequence can include one or more functional portions. For example, it can include a presequence (a signal polypeptide) and/or a pro sequence. Processing of a polypeptide into a mature polypeptide results in the cleavage of a precursor sequence from a polypeptide. The precursor sequence, when it includes a presequence and a prosequence also can be referred to as a pre/prosequence.

[0200] As used herein, a “presequence”, “signal sequence”, “signal peptide”, “leader sequence” or “leader peptide” refers to a sequence of amino acids at the amino terminus of nascent polypeptides, which target proteins to the secretory pathway and are cleaved from the nascent chain once translocated in the endoplasmic reticulum membrane.

[0201] As used herein, a prosequence refers to a sequence encoding a propeptide which when it is linked to a polypeptide can exhibit diverse regulatory functions including, but not limited to, contributing to the correct folding and formation of disulfide bonds of a mature polypeptide, contributing to the activation of a polypeptide upon cleavage of the pro-peptide, and/or contributing as recognition sites. Generally, a pro-sequence is cleaved off within the cell before secretion, although it can also be cleaved extracellularly by exoproteases. In some examples, a pro-sequence is autocatalytically cleaved while in other examples another polypeptide protease cleaves a pro-sequence.

[0202] As used herein, homologous with reference to a molecule, such as a nucleic acid molecule or polypeptide, from different species that correspond to each other and that are identical or very similar to each other (i.e., are homologs).

[0203] As used herein, heterologous with reference to a molecule, such as a nucleic acid or polypeptide, that is unique in activity or sequence. A heterologous molecule can be derived from a separate genetic source or species. For purposes herein, a heterologous molecule is a protein or polypeptide, regardless of origin, other than a CSR isoform, such as for example a RAGE isoform, or allelic variants thereof. Thus, molecules heterologous to a CSR isoform include any molecule containing a sequence that is not derived from, endogenous to, or homologous to the sequence of a CSR isoform. Examples of heterologous molecules of interest herein include secretion signals from a different polypeptide of the same or different species, a tag such as a fusion tag or label, or all or part of any other molecule that is not homologous to and whose sequence is not the same as that of a CSR isoform. A heterologous molecule can be fused to a nucleic acid or polypeptide sequence of interest for the generation of a fusion or chimeric molecule.

[0204] As used herein, a heterologous secretion signal refers to a signal sequence from a polypeptide, from the same or different species, that is different in sequence from the signal sequence of a CSR isoform. A heterologous secretion signal can be used in a host cell from which it is derived or it can be used host cells that differ from the cells from which the signal sequence is derived.

[0205] As used herein, an endogenous precursor sequence or endogenous signal sequence refers to the naturally occurring signal sequence associated with all or part of a polypeptide. For example, for the exemplary RAGE polypeptide set forth in SEQ ID NO:2, the signal sequence corresponds to amino acids 1-22. The C-terminal boundary of a signal peptide may vary, however, typically by no more than about 5 amino acids on either side of the signal peptide C-terminal boundary. Algorithms are available and known to one of skill in the art to identify signal sequences and predict their cleavage site (see e.g., Chou et al., (2001), Proteins 42:136; McGeoch et al., (1985) Virus Res. 3:271; von Heijne et al., (1986) Nucleic Acids Res. 14:4683).

[0206] As used herein, tissue plasminogen activator (tPA) refers to an extrinsic (tissue-type) plasminogen activator having fibrinolytic activity and typically having a structure with five domains (finger, growth factor, kringle-1, kringle-2, and protease domains). Mammalian t-PA includes t-PA from any animals, including humans. Other species include, but are not limited, to rabbit, rat, porcine, non human primate, equine, murine, dog, cat, bovine and ovine tPA. Nucleic acid encoding tPA including the precursor polypeptide(s) from human and non-human species is known in the art.

[0207] As used herein, a tPA precursor sequence refers to a sequence of amino residues that includes the presequence and prosequence from tPA (i.e., is a pre/prosequence, see e.g., U.S. Pat. No. 6,693,181 and U.S. Pat. No. 4,766,075). This polypeptide is naturally associated with tPA and acts to direct the secretion of a tPA from a cell. An exemplary precursor sequence for tPA is set forth in SEQ ID NO:327 and encoded by a nucleic acid sequence set forth in SEQ ID NO:326. The precursor sequence includes the signal sequence (amino acids 1-23) and a prosequence (amino acids 24-35). The prosequence includes two protease cleavage site: one after residue 32 and another after residue 35. Exemplary species variants of precursor sequences are forth in any one of SEQ ID NOS: 332-339; exemplary nucleotide and amino acid allelic variants are set forth in SEQ ID NOS:330 or 331.

[0208] As used herein, all or a portion of a tPA precursor sequence refers to any contiguous portion of amino acids of a tPA precursor sequence sufficient to direct processing and/or secretion of tPA from a cell. All or a portion of a precursor sequence can include all or a portion of a wildtype or predominant tPA precursor sequence such as set forth in SEQ ID NO:327 and encoded by SEQ ID NO:326, allelic variants thereof set forth in SEQ ID NO: 331, or species variants set forth in SEQ ID NOS:332-339. For example, for the exemplary tPA precursor sequence set forth in SEQ ID NO:327, a portion of a tPA precursor sequence can include amino acids 1-23, or amino acids 24-35, 24-32, or amino acids 33-35, or any other contiguous sequence of amino acids 1-35 set forth in SEQ ID NO:327.

[0209] As used herein, active portion a polypeptide, such as with reference to an active portion of an isoform, refers to a portion of polypeptide that has an activity.

[0210] As used herein, purification of a protein refers to is the process of isolating a protein, such as from a homogenate, which can contain cell and tissue components, including DNA, cell membrane and other proteins. Proteins can be purified in any of a variety of ways known to those of skill in the art, such as for example, according to their isoelectric points by running them through a pH graded gel or an ion exchange column, according to their size or molecular weight via size exclusion chromatography or by SDS-PAGE (sodium dodecyl sulfate-polyacrylamide gel electrophoresis) analysis, or according to their hydrophobicity. Other purification techniques include, but are not limited to, precipitation or affinity chromatography, including immuno-affinity chromatography, and others and methods that include combination of any of these methods. Furthermore, purification can be facilitated by including a tag on the molecule, such as a his tag for affinity purification or a detectable marker for identification.

[0211] As used herein, detection includes methods that permits visualization (by eye or equipment) of a protein. A protein can be visualized using an antibody specific to the protein. Detection of a protein can also be facilitated by fusion of a protein with a tag including an epitope tag or label.

[0212] As used herein, a “tag” refers to a sequence of amino acids, typically added to the N- or C-terminus of a polypeptide. The inclusion of tags fused to a polypeptide can facilitate polypeptide purification and/or detection.

[0213] As used herein, an epitope tag includes a sequence of amino acids that has enough residues to provide an epitope against which an antibody can be made, yet short enough so that it does not interfere with an activity of the polypeptide to which it is fused. Suitable tag polypeptides generally have at least 6 amino acid residues and usually between about 8 and 50 amino acid residues.

[0214] As used herein, a label refers to a detectable compound or composition which is conjugated directly or indirectly to an isoform so as to generate a labeled isoform. The label can be detectable by itself (e.g., radioisotope labels or fluorescent labels) or, in the case of an enzymatic label, can catalyze chemical alteration of a substrate compound composition which is detectable. Non-limiting examples of labels included fluorogenic moieties, green fluorescent protein, or luciferase.

[0215] As used herein, a fusion tagged polypeptide refers to a chimeric polypeptide containing an isoform polypeptide fused to a tag polypeptide.

[0216] As used herein, expression refers to the process by which a gene's coded information is converted into the structures present and operating in the cell. Expressed genes include those that are transcribed into mRNA and then translated into protein and those that are transcribed into RNA but not translated into protein (e.g., transfer and ribosomal RNA). For purposes herein, a protein that is expressed can be retained inside the cells, such as in the cytoplasm, or can be secreted from the cell.

[0217] As used herein, a fusion construct refers to a nucleic acid sequence containing coding sequence from one nucleic acid molecule and the coding sequence from nucleic acid molecule in which the coding sequences are in the same reading frame such that when the fusion construct is transcribed and translated in a host cell, the protein is produced containing the two proteins. The two molecules can be adjacent in the construct or separated by a linker polypeptide that contains, 1, 2, 3, or more, typically few than 10, 9, 8, 7, 6 amino acids. The protein product encoded by a fusion construct is referred to as a fusion polypeptide.

[0218] As used herein, an isoform fusion protein or an isoform fusion polypeptide refers to a polypeptide encoded by nucleic acid molecule that contain a coding sequence from an isoform, with or without an intron sequence, and a coding sequence that encodes another polypeptide, such as a precursor sequence or an epitope tag. The nucleic acids are operatively linked such that when the isoform fusion construct is transcribed and translated, an isoform fusion polypeptide is produced in which the isoform polypeptide is joined directly or via a linker to another peptide. An isoform polypeptide, typically is linked at the N-, or C-terminus, or both, to one or more other polypeptides peptides.

[0219] As used herein, a promoter region refers to the portion of DNA of a gene that controls transcription of the DNA to which it is operatively linked. The promoter region includes specific sequences of DNA that are sufficient for RNA polymerase recognition, binding and transcription initiation. This portion of the promoter region is referred to as the promoter. In addition, the promoter region includes sequences that modulate this recognition, binding and transcription initiation activity of the RNA polymerase. These sequences can be cis acting or can be responsive to trans acting factors. Promoters, depending upon the nature of the regulation, can be constitutive or regulated.

[0220] As used herein, regulatory region means a cis-acting nucleotide sequence that influences expression, positively or negatively, of an operatively linked gene. Regulatory regions include sequences of nucleotides that confer inducible (i.e., require a substance or stimulus for increased transcription) expression of a gene. When an inducer is present or at increased concentration, gene expression can be increased. Regulatory regions also include sequences that confer repression of gene expression (i.e., a substance or stimulus decreases transcription). When a repressor is present or at increased concentration gene expression can be decreased. Regulatory regions are known to influence, modulate or control many in vivo biological activities including cell proliferation, cell growth and death, cell differentiation and immune modulation. Regulatory regions typically bind to one or more trans-acting proteins, which results in either increased or decreased transcription of the gene.

[0221] Particular examples of gene regulatory regions are promoters and enhancers. Promoters are sequences located around the transcription or translation start site, typically positioned 5′ of the translation start site. Promoters usually are located within 1 Kb of the translation start site, but can be located further away, for example, 2 Kb, 3 Kb, 4 Kb, 5 Kb or more, up to an including 10 Kb. Enhancers are known to influence gene expression when positioned 5′ or 3′ of the gene, or when positioned in or a part of an exon or an intron. Enhancers also can function at a significant distance from the gene, for example, at a distance from about 3 Kb, 5 Kb, 7 Kb, 10 Kb, 15 Kb or more.

[0222] Regulatory regions also include, in addition to promoter regions, sequences that facilitate translation, splicing signals for introns, maintenance of the correct reading frame of the gene to permit in-frame translation of mRNA and, stop codons, leader sequences and fusion partner sequences, internal ribosome binding sites (IRES) elements for the creation of multigene, or polycistronic, messages, polyadenylation signals to provide proper polyadenylation of the transcript of a gene of interest and stop codons and can be optionally included in an expression vector.

[0223] As used herein, the “amino acids,” which occur in the various amino acid sequences appearing herein, are identified according to their well-known, three-letter or one-letter abbreviations (see Table 1). The nucleotides, which occur in the various DNA fragments, are designated with the standard single-letter designations used routinely in the art.

[0224] As used herein, “amino acid residue” refers to an amino acid formed upon chemical digestion (hydrolysis) of a polypeptide at its peptide linkages. The amino acid residues described herein are generally in the “L” isomeric form. Residues in the “D” isomeric form can be substituted for any L-amino acid residue, as long as the desired functional property is retained by the polypeptide. NH2 refers to the free amino group present at the amino terminus of a polypeptide. COOH refers to the free carboxy group present at the carboxyl terminus of a polypeptide. In keeping with standard polypeptide nomenclature described in J. Biol. Chem., 243:3552-59 (1969) and adopted at 37 C.F.R. .§§. 1.821-1.822, abbreviations for amino acid residues are shown in Table 1:

TABLE 1
Table of Correspondence

SYMBOL

| 1-Letter | 3-Letter | AMINO ACID |
|---|---|---|
| Y | Tyr | tyrosine |
| G | Gly | glycine |
| F | Phe | phenylalanine |
| M | Met | methionine |
| A | Ala | alanine |
| S | Ser | serine |
| I | Ile | isoleucine |
| L | Leu | leucine |
| T | Thr | threonine |
| V | Val | valine |
| P | Pro | proline |
| K | Lys | lysine |
| H | His | Histidine |
| Q | Gln | Glutamine |
| E | Glu | glutamic acid |
| Z | Glx | Glu and/or Gln |
| W | Trp | Tryptophan |
| R | Arg | Arginine |
| D | Asp | aspartic acid |
| N | Asn | Asparagines |
| B | Asx | Asn and/or Asp |
| C | Cys | Cysteine |
| X | Xaa | Unknown or other |

[0225] All sequences of amino acid residues represented herein by a formula have a left to right orientation in the conventional direction of amino-terminus to carboxyl-terminus. In addition, the phrase “amino acid residue” is defined to include the amino acids listed in the Table of Correspondence modified, non-natural and unusual amino acids. Furthermore, it should be noted that a dash at the beginning or end of an amino acid residue sequence indicates a peptide bond to a further sequence of one or more amino acid residues or to an amino-terminal group such as NH2 or to a carboxyl-terminal group such as COOH.

[0226] In a peptide or protein, suitable conservative substitutions of amino acids are known to those of skill in this art and generally can be made without altering an activity of a resulting molecule. Those of skill in this art recognize that, in general, single amino acid substitutions in non-essential regions of a polypeptide do not substantially alter biological activity (see, e.g., Watson et al. Molecular Biology of the Gene, 4th Edition, 1987, The Benjamin/Cummings Pub. co., p. 224).

[0227] Such substitutions may be made in accordance with those set forth in TABLE 2 as follows:

TABLE 2

| Original | Conservative |
|---|---|
| residue | substitution |
| Ala (A) | Gly; Ser |
| Arg (R) | Lys |
| Asn (N) | Gln; His |
| Cys (C) | Ser |
| Gln (Q) | Asn |
| Glu (E) | Asp |
| Gly (G) | Ala; Pro |
| His (H) | Asn; Gln |
| Ile (I) | Leu; Val |
| Leu (L) | Ile; Val |
| Lys (K) | Arg; Gln; Glu |
| Met (M) | Leu; Tyr; Ile |
| Phe (F) | Met; Leu; Tyr |
| Ser (S) | Thr |
| Thr (T) | Ser |
| Trp (W) | Tyr |
| Tyr (Y) | Trp; Phe |
| Val (V) | Ile; Leu |

Other substitutions also are permissible and can be determined empirically or in accord with other known conservative or non-conservative substitutions.

[0228] As used herein, a peptidomimetic is a compound that mimics the conformation and certain stereochemical features of the biologically active form of a particular peptide. In general, peptidomimetics are designed to mimic certain desirable properties of a compound, but not the undesirable properties, such as flexibility, that lead to a loss of a biologically active conformation and bond breakdown. Peptidomimetics can be prepared from biologically active compounds by replacing certain groups or bonds that contribute to the undesirable properties with bioisosteres. Bioisosteres are known to those of skill in the art. For example the methylene bioisostere CH2S has been used as an amide replacement in enkephalin analogs (see, e.g., Spatola (1983) pp. 267-357 in Chemistry and Biochemistry of Amino Acids, Peptides, and Proteins, Weinstein, Ed. volume 7, Marcel Dekker, New York). Morphine, which can be administered orally, is a compound that is a peptidomimetic of the peptide endorphin. For purposes herein, cyclic peptides are included among peptidomimetics.

[0229] As used herein, “similarity” between two proteins or nucleic acids refers to the relatedness between the amino acid sequences of the proteins or the nucleotide sequences of the nucleic acids. Similarity can be based on the degree of identity and/or homology of sequences and the residues contained therein. Methods for assessing the degree of similarity between proteins or nucleic acids are known to those of skill in the art. For example, in one method of assessing sequence similarity, two amino acid or nucleotide sequences are aligned in a manner that yields a maximal level of identity between the sequences. “Identity” refers to the extent to which the amino acid or nucleotide sequences are invariant. Alignment of amino acid sequences, and to some extent nucleotide sequences, also can take into account conservative differences and/or frequent substitutions in amino acids (or nucleotides). Conservative differences are those that preserve the physico-chemical properties of the residues involved. Alignments can be global (alignment of the compared sequences over the entire length of the sequences and including all residues) or local (the alignment of a portion of the sequences that includes only the most similar region or regions).

[0230] “Identity” per se has an art-recognized meaning and can be calculated using published techniques. (See, e.g.: Computational Molecular Biology, Lesk, A. M., ed., Oxford University Press, New York, 1988; Biocomputing: Informatics and Genome Projects, Smith, D. W., ed., Academic Press, New York, 1993; Computer Analysis of Sequence Data, Part I, Griffin, A. M., and Griffin, H. G., eds., Humana Press, New Jersey, 1994; Sequence Analysis in Molecular Biology, von Heinje, G., Academic Press, 1987; and Sequence Analysis Primer, Gribskov, M. and Devereux, J., eds., M Stockton Press, New York, 1991). While there exist a number of methods to measure identity between two polynucleotide or polypeptide sequences, the term “identity” is well known to skilled artisans (Carillo, H. & Lipton, D., SIAM J Applied Math 48:1073 (1988)).

[0231] As used herein, sequence identity compared along the full length of each SEQ ID to the full length of a RAGE isoform refers to the percentage of identity of an amino acid sequence of a RAGE isoform polypeptide along its full-length to a reference polypeptide, designated by a specified SEQ ID, along its full length. For example, if a polypeptide A has 100 amino acids and polypeptide B has 95 amino acids, identical to amino acids 1-95 of polypeptide A, then polypeptide B has 95% identity when sequence identity is compared along the full length of a polypeptide A compared to full length of polypeptide B. Typically, where a RAGE isoform polypeptide or a reference polypeptide is a mature polypeptide lacking a signal sequence, sequence identity is compared along the full length of the polypeptides, excluding the signal sequence portion. For example, if a RAGE isoform lacks a signal peptide but a reference polypeptide contains a signal peptide, comparison along the full length of both polypeptides for determination of sequence identity excludes the signal sequence portion of the reference polypeptide. For example, SEQ ID NO:10 contains a signal peptide corresponding to amino acids 1-22. Thus, when comparing sequence identity of a full length of a RAGE isoform to the full length of a polypeptide set forth in SEQ ID NO:10, amino acids 1-22 of SEQ ID NO:10 are excluded from the analysis. Additionally, where a RAGE isoform or reference polypeptide is a precursor polypeptide containing a signal sequence, sequence identity is compared along the full length of both polypeptides including the signal sequence portion. As discussed below, and known to those of skill in the art, various programs and methods for assessing identity are known to those of skill in the art. For example, a global alignment, such as using the Needleman-Wunsch global alignment algorithm, can be used to find the optimum alignment and identity of two sequences when considering the entire length. High levels of identity, such as 90% or 95% identity, readily can be determined without software.

[0232] As used herein, by homologous (with respect to nucleic acid and/or amino acid sequences) means about greater than or equal to 25% sequence homology, typically greater than or equal to 25%, 40%, 60%, 70%, 80%, 85%, 90% or 95% 90% or 95% sequence homology; the precise percentage can be specified if necessary. For purposes herein the terms “homology” and “identity” often are used interchangeably, unless otherwise indicated. In general, for determination of the percentage homology or identity, sequences are aligned so that the highest order match is obtained (see, e.g.: Computational Molecular Biology, Lesk, A. M., ed., Oxford University Press, New York, 1988; Biocomputing: Informatics and Genome Projects, Smith, D. W., ed., Academic Press, New York, 1993; Computer Analysis of Sequence Data, Part I, Griffin, A. M., and Griffin, H. G., eds., Humana Press, New Jersey, 1994; Sequence Analysis in Molecular Biology, von Heinje, G., Academic Press, 1987; and Sequence Analysis Primer, Gribskov, M. and Devereux, J., eds., M Stockton Press, New York, 1991; Carillo et al. (1988) SIAM J Applied Math 48:1073). By sequence homology, the number of conserved amino acids is determined by standard alignment algorithms programs, and can be used with default gap penalties established by each supplier. Substantially homologous nucleic acid molecules would hybridize typically at moderate stringency or at high stringency all along the length of the nucleic acid of interest. Also contemplated are nucleic acid molecules that contain degenerate codons in place of codons in the hybridizing nucleic acid molecule.

[0233] Whether any two nucleic acid molecules have nucleotide sequences that are at least 60%, 70%, 80%, 85%, 90%, 95%, 96%, 97%, 98% or 99% “identical” or “homologous” can be determined using known computer algorithms such as the “FAST A” program, using for example, the default parameters as in Pearson et al. (1988) Proc. Natl. Acad. Sci. USA 85:2444 (other programs include the GCG program package (Devereux, J., et al., Nucleic Acids Research 12(I):387 (1984)), BLASTP, BLASTN, FASTA (Atschul, S. F., et al., J Molec Biol 215:403 (1990); Guide to Huge Computers, Martin J. Bishop, ed., Academic Press, San Diego, 1994, and Carillo et al. (1988) SIAM J Applied Math 48:1073). For example, the BLAST function of the National Center for Biotechnology Information database can be used to determine identity. Other commercially or publicly available programs include, DNAStar “MegAlign” program (Madison, Wis.) and the University of Wisconsin Genetics Computer Group (UWG) “Gap” program (Madison Wis.)). Percent homology or identity of proteins and/or nucleic acid molecules can be determined, for example, by comparing sequence information using a GAP computer program (e.g., Needleman et al. (1970) J. Mol. Biol. 48:443, as revised by Smith and Waterman ((1981) Adv. Appl. Math. 2:482). Briefly, the GAP program defines similarity as the number of aligned symbols (i.e., nucleotides or amino acids), which are similar, divided by the total number of symbols in the shorter of the two sequences. Default parameters for the GAP program can include: (1) a unary comparison matrix (containing a value of 1 for identities and 0 for non-identities) and the weighted comparison matrix of Gribskov et al. (1986) Nucl. Acids Res. 14:6745, as described by Schwartz and Dayhoff, eds., ATLAS OF PROTEIN SEQUENCE AND STRUCTURE, National Biomedical Research Foundation, pp. 353-358 (1979); (2) a penalty of 3.0 for each gap and an additional 0.10 penalty for each symbol in each gap; and (3) no penalty for end gaps.

[0234] Therefore, as used herein, the term “identity” or “homology” represents a comparison between a test and a reference polypeptide or polynucleotide. As used herein, the term at least “90% identical to” refers to percent identities from 90 to 99.99 relative to the reference nucleic acid or amino acid sequences. Identity at a level of 90% or more is indicative of the fact that, assuming for exemplification purposes a test and reference polypeptide length of 100 amino acids are compared. No more than 10% (i.e., 10 out of 100) amino acids in the test polypeptide differs from that of the reference polypeptide. Similar comparisons can be made between test and reference polynucleotides. Such differences can be represented as point mutations randomly distributed over the entire length of an amino acid sequence or they can be clustered in one or more locations of varying length up to the maximum allowable, e.g. 10/100 amino acid difference (approximately 90% identity). Differences are defined as nucleic acid or amino acid substitutions, insertions or deletions. At the level of homologies or identities above about 85-90%, the result should be independent of the program and gap parameters set; such high levels of identity can be assessed readily, often by manual alignment without relying on software.

[0235] As used herein, an aligned sequence refers to the use of homology (similarity and/or identity) to align corresponding positions in a sequence of nucleotides or amino acids. Typically, two or more sequences that are related by 50% or more identity are aligned. An aligned set of sequences refers to 2 or more sequences that are aligned at corresponding positions and can include aligning sequences derived from RNAs, such as ESTs and other cDNAs, aligned with genomic DNA sequence.

[0236] As used herein, a polypeptide comprising a specified percentage of amino acids set forth in a reference polypeptide refers to the proportion of contiguous identical amino acids shared between a polypeptide and a reference polypeptide. For example, a RAGE isoform that comprises 70% of the amino acids set forth in a reference polypeptide having a sequence of amino acids set forth in SEQ ID NO:10 means that the reference polypeptide contains at least 103 contiguous amino acids set forth in the amino acid sequence of SEQ ID NO:10.

[0237] As used herein, “primer” refers to a nucleic acid molecule that can act as a point of initiation of template-directed DNA synthesis under appropriate conditions (e.g., in the presence of four different nucleoside triphosphates and a polymerization agent, such as DNA polymerase, RNA polymerase or reverse transcriptase) in an appropriate buffer and at a suitable temperature. Certain nucleic acid molecules can serve as a “probe” and as a “primer.” A primer, however, as a 3′ hydroxyl group for extension. A primer can be used in a variety of methods, including, for example, polymerase chain reaction (PCR), reverse-transcriptase (RT)-PCR, RNA PCR, LCR, multiplex PCR, panhandle PCR, capture PCR, expression PCR, 3′ and 5′ RACE, in situ PCR, ligation-mediated PCR and other amplification protocols.

[0238] As used herein, “primer pair” refers to a set of primers that includes a 5′ (upstream) primer that hybridizes with the 5′ end of a sequence to be amplified (e.g. by PCR) and a 3′ (downstream) primer that hybridizes with the complement of the 3′ end of the sequence to be amplified.

[0239] As used herein, “specifically hybridizes” refers to annealing, by complementary base-pairing, of a nucleic acid molecule (e.g. an oligonucleotide) to a target nucleic acid molecule. Those of skill in the art are familiar with in vitro and in vivo parameters that affect specific hybridization, such as length and composition of the particular molecule. Parameters particularly relevant to in vitro hybridization further include annealing and washing temperature, buffer composition and salt concentration. Exemplary washing conditions for removing non-specifically bound nucleic acid molecules at high stringency are 0.1×SSPE, 0.1% SDS, 65° C., and at medium stringency are 0.2×SSPE, 0.1% SDS, 50° C. Equivalent stringency conditions are known in the art. The skilled person can readily adjust these parameters to achieve specific hybridization of a nucleic acid molecule to a target nucleic acid molecule appropriate for a particular application.

[0240] As used herein, an effective amount is the quantity of a therapeutic agent necessary for preventing, curing, ameliorating, arresting or partially arresting a symptom of a disease or disorder.

[0241] As used herein, unit dose form refers to physically discrete units suitable for human and animal subjects and packaged individually as is known in the art.

[0242] As used herein, a single dosage formulation refers to a formulation for direct administration.

B. Receptor for Advanced Glycation Endproducts (RAGE)

[0243] Provided herein are isoforms of Receptor for Advanced Glycation Endproducts (RAGE) and methods of preparing RAGE isoforms. The RAGE isoforms differ from the cognate receptors in that there are insertions and/or deletions so the resulting RAGE receptor isoforms exhibit a difference in one or more activities or functions or in structure compared to the cognate receptor. Activities of functions include, but are not limited to, localization, ligand interactions and signal transduction. The RAGE isoforms typically are secreted, not membrane bound, and are selected to modulate the activities of RAGE.

[0244] 1. RAGE

[0245] RAGE is a cell-surface receptor that is a member of the immunoglobulin family. RAGEs interact with a variety of macromolecular ligands. For example, glycated adducts of macromolecules, such as glycated proteins and lipids produced by non-enzymatic glycation interact with RAGEs. These glycated adducts, also known as advanced glycation endproducts (AGEs) accumulate in cells and tissues during the normal aging process. Enhanced and/or accelerated accumulation of AGEs occurs in sites of inflammation, in renal failure, under hyperglycemic conditions and conditions of systemic or local oxidative stress. Accumulation can occur in tissues such as vascular tissues. For example AGEs accumulate as AGE-β2-microglobulin in subjects and patients and subjects with dialysis-related amyloidosis and in vasculature and tissues of diabetes patients and subjects

[0246] RAGE can bind to additional ligands including S100/calgranulins, β-sheet fibrils, amyloid β peptide, Aβ, amylin, serum amyloid A, prion-derived peptides and amphoterin. S100/calgranulins are cytokine-like pro-inflammatory molecules. S100 proteins (S100P) participate in calcium dependent regulation and other signal transduction pathways. S100P forms S100A12 and S100B are extracellular and can bind to RAGE. S100Ps are expressed in a restricted pattern that includes expression in placental and esophageal epithelial cells. S100Ps also are expressed in cancer cells, including breast cancer, colon cancer, prostate cancer, and pancreatic adenocarcinoma. Amphoterin is a polypeptide, approximately 30 kDa, that is expressed in the nervous system. It also is expressed in transformed cells such as c6 glioma cells, HL-60 promyelocytes, U937 promomonocyes, HT1080 fibrosarcoma cells and B16 melanoma cells (Hori et al. (1995) J. Bio. Chem. 270:25752-61).

[0247] The RAGE gene (SEQ ID NO:325) is composed of 11 exons interrupted by 10 introns. In the exemplary genomic sequence of RAGE provided herein as SEQ ID NO:325, exon 1 includes nucleotides 601-754, including the 5′-untranslated region. The start codon begins at nucleotide position 703. Intron 1 includes nucleotides 755-937; exon 2 includes nucleotides 938-1044; intron 2 includes nucleotides 1145-1174; exon 3 includes nucleotides 1175-1370; intron 3 includes nucleotides 1371-1536; exon 4 includes nucleotides 1537-1601; intron 4 includes nucleotides 1602-1723; exon 5 includes nucleotides 1724-1811; intron 5 includes nucleotides 1812-1901; exon 6 includes nucleotides 1902-2084; intron 6 includes nucleotides 2085-2226; exon 7 includes nucleotides 2227-2357; intron 7 includes nucleotides 2358-2536; exon 8 includes nucleotides 2537-2678; intron 8 includes nucleotides 2679-3292; exon 9 includes nucleotides 3293-3319; intron 9 includes nucleotides 3320-3447; exon 10 includes nucleotides 3448-3574; intron 10 includes nucleotides 3575-3685; and exon 11 includes nucleotides 3686-3957. The stop codon in exon 11 begins at nucleotide position 3749, and the remainder of exon 11 includes the 3′-untranslated region. Following RNA splicing and the removal of the introns, the primary transcript of RAGE contains exons 1-11 and encodes a polypeptide of 404 amino acids (SEQ ID NO:2).

[0248] The RAGE polypeptide contains a number of domains. It has a signal peptide located at the N-terminus. For example, in the exemplary full-length RAGE polypeptide set forth herein as SEQ ID NO:2 and encoded by SEQ ID NO:1, the signal peptide is located at amino acids 1-22. RAGE contains a transmembrane domain. In the exemplary full-length RAGE polypeptide set forth herein as SEQ ID NO:2, the transmembrane domain is between amino acids 343 and 363. RAGE also contains three immunoglobulin-like (Ig-like) domains on the N-terminal side from the transmembrane domain. In the exemplary full-length RAGE polypeptide set forth herein as SEQ ID NO:2, the Ig-like domains are located at amino acids 23-116, 124-221 and 227-317. The first of the Ig-like domains (amino acids 23-116 of SEQ ID NO:2) is a variable-type (V-type) Ig-like domain, whereas the other two Ig-like domains are characterized as similar to constant regions (C-type). The V-type Ig-like domain can mediate interaction with ligands, such as AGEs (Kislinger et al. (1999(J. Biol. Chem. 274: 31740-49). The C-terminus of the RAGE protein is intracellular. In the exemplary full-length RAGE polypeptide set forth herein as SEQ ID NO:2, the C-terminus encompasses amino acids 364-404. The C-terminus participates in RAGE-mediated signal transduction (Ding et al. (2005) Neuroscience letters 373:67-72).

[0249] RAGE also can be post-translationally modified. For example, RAGE contains cysteines that can participate in disulfide bonding. In the exemplary full-length RAGE polypeptide set forth herein as SEQ ID NO:2, cysteines at positions C₃₈, C₉₉, C₁₄₄, C₂₀₈, C₂₅₉ and C₃₀₁ can participate in disulfide bonding. Potential disulfide bonds include C₃₈-C₉₉, C₁₄₄-C₂₀₈ and C₂₅₉-C₃₀₁. RAGE contains N-glycosylation sites. In the exemplary full-length RAGE polypeptide set forth herein as SEQ ID NO:2, N-glycosylation sites are N₂₅ and N₈₁.

[0250] RAGE participates in a variety of biological activities, directly and indirectly. For example, RAGE is localized to the cell membrane. It contains a transmembrane domain. Removal of this domain can result in a soluble receptor that is secreted into the intercellular space. Ligand binding is another function of RAGE. The receptor can bind ligands such as AGEs and remove AGEs. For example, binding of RAGE to AGEs can result in endocytosis or transcytosis of the ligand. RAGE also can bind ligand when the receptor is complexed with another AGE binding protein, the lactoferrin-like AGE binding protein (LF-L). Binding as a complex can stabilize ligand interactions. RAGE, in a soluble form, also can bind to heparin. Binding to heparin can mediate binding of the receptor to the extracellular matrix (ECM) through interactions with heparin sulfate on cell membranes and the ECM.

[0251] RAGE also participates in signal transduction pathways. Participation in such pathways can modulate particular cellular responses, including inducing, augmenting, suppressing and preventing such responses. Examples of cellular responses modulated by RAGE include, but are not limited to, induction of neurite outgrowth, cytoskeletal reorganization, cellular oxidant stress induction, NF-κB modulation, triggering and modulation of pro-inflammatory responses, activation of the RAS-MAP kinase pathway, induction of cytokines, induction of growth factors such as VEGF, TNFα, and PDGF, induction of type IV collagen expression, induction of VCAM-1, ERK1/2 phosphorylation, EC migration, modulation of Rac, cdc42, Rho family of proteins and modulation of GTPases. RAGE also can participate in self-regulation and regulation of endogenous RAGE such as by modulating the expression from a RAGE promoter.

C. RAGE Receptor Isoforms

[0252] Provided herein are RAGE receptor isoforms and methods of preparing RAGE receptor isoforms. The RAGE receptor isoforms differ from the cognate receptor in that the polypeptide contains insertions and/or deletions of amino acids and the resulting RAGE receptor isoforms exhibit a difference in one or more biological activities or functions or structure compared to the cognate receptor. Such changes to a RAGE receptor polypeptide sequence can include disruption or elimination of all of or a portion of one or more domains of RAGE. For example, the changes that RAGE isoforms exhibit compared to a RAGE include, but are not limited to elimination and/or disruption of all or part of a signal peptide, an immunoglobulin-like domain, a cytosolic domain, and/or a transmembrane domain. In one example, the RAGE isoforms provided herein differ from the full-length RAGE cognate receptor in that the nucleic acids encoding the isoforms retain part or all of any one or more of the ten introns. The RAGE receptor isoforms provided herein can be used for modulating the activity of a cell surface receptor, particularly a RAGE. They also can be used as targeting agents for delivery of molecules, such as drugs or toxins or nucleic acids, to targeted cells or tissues in vivo or in vitro.

[0253] Pharmaceutical compositions containing one or more different RAGE isoforms are provided. The pharmaceutical compositions can be used to treat diseases that include inflammatory diseases, immune diseases, cancers, and other diseases that manifest aberrant angiogenesis or neovascularization. Cancers include breast, lung, colon, gastric cancers, pancreatic cancers and others. Inflammatory diseases, include, for example, diabetic retinopathies and/or neuropathies and other inflammatory vascular complications of diabetes, autoimmune diseases, including autoimmune diabetes, atherosclerosis, Crohn's disease, diabetic kidney disease, cystic fibrosis, endometriosis, diabetes-induced vascular injury, inflammatory bowel disease, Alzheimers disease and other neurodegenerative diseases, and other diseases known to those of skill in the art in which a RAGE, VEGF and other immune response and inflammatory responses are implicated, involved or in which they participate.

[0254] Also provided are methods of treatment of diseases and conditions by administering the pharmaceutical compositions or delivering a RAGE isoform, such by administering a vector that encodes the isoform. Administration can be effected in vivo or ex vivo.

[0255] Methods are provided herein for expressing, isolating and formulating RAGE isoforms, including producing RAGE isoforms and nucleic acid molecules encoding RAGE isoforms. Also provided are combinations of RAGE isoforms and other cell surface receptor isoforms including, but not limited to herstatins and other ERBB isoforms, isoforms of FGFRs and others.

[0256] 1. Identification and Production of RAGE Isoforms

[0257] As noted, RAGE isoforms are polypeptides that lack a domain or portion of a domain or have a disruption of a domain compared with a wildtype or predominant form of RAGE and can be altered in an activity compared to the cognate receptor. RAGE isoforms represent variants of a RAGE gene that can be generated by alternate splicing or by recombinant or synthetic (e.g., in silico and/or chemical synthesis) methods.

[0258] Typically, a RAGE isoform produced from an alternatively spliced RNA is not a predominant form of a polypeptide produced encoded by a gene. In some instances, a RAGE isoform can be a tissue-specific or developmental stage-specific polypeptide or disease specific (i.e., can be expressed at a difference level from tissue-to-tissue or stage-to-stage or in a disease state compared to a non-diseased state or only may be expressed in the tissue, at the stage or during the disease process or progress). Alternatively spliced RNA form that can encode RAGE isoforms include, but are not limited to, exon deletion, exon retention, exon extension, exon truncation, and intron retention alternatively spliced RNAs.

[0259] (a) Alternative Splicing and Generation of RAGE Isoforms

[0260] Genes in eukaryotes include intron and exons that are transcribed by RNA polymerase into RNA products generally referred to as pre-mRNA. Pre-mRNAs are typically intermediate products that are further processed through RNA splicing and processing to generate a final messenger RNA (mRNA). Typically, a final mRNA contains exons sequences and is obtained by splicing out the introns. Boundaries of introns and exons are marked by splice junctions, sequences of nucleotides that are used by the splicing machinery of the cell as signals and substrates for removing introns and joining together exon sequences. Exons are operatively linked together to form a mature RNA molecule. Typically, one or more exons in an mRNA contains an open reading frame encoding a polypeptide. In many cases, an open reading frame can be generated by operatively linking two or more exons; for example, a coding sequence can span exon junctions and an open reading frame is maintained across the junctions.

[0261] RNA also can undergo alternative splicing to produce a variety of different mRNA transcripts from a single gene. Alternatively spliced mRNAs can contain different numbers of and/or arrangements of exons. For example, a gene that has 10 exons can generate a variety of alternatively spliced mRNAs. Some mRNAs can contain all 10 exons, some with only 9, 8, 7, 6, 5 etc. In addition, products for example, with 9 of the 10 exons, can be among a variety of mRNAs, each with a different exon missing. Alternatively spliced mRNAs can contain additional exons, not typically present in an RNA encoding a predominant or wild type form. Addition and deletion of exons includes addition and deletion, respectively of a 5′ exon, 3′exon and an exon internal in an RNA. Alternatively spliced RNAs also include addition of an intron or a portion of an intron operatively linked to or within an RNA. For example, an intron normally removed by splicing in an RNA encoding a wildtype or predominant form can be present in an alternatively spliced RNA. An intron or intron portion can be operatively linked within an RNA, such as between two exons. An intron or intron portion can be operatively linked at one end of an RNA, such as at the 3′ end of a transcript. In some examples, the presence of intron sequence within an RNA terminates transcription based on poly-adenylation sequences within an intron.

[0262] Alternative RNA splicing patterns can vary depending upon the cell and tissue type. Alternative RNA splicing also can be regulated by developmental stage of an organism, cell or tissue type. For example, RNA splicing enzymes and polypeptides that regulate RNA splicing can be present at different concentrations in particular cell and tissue types and at particular stages of development. In some cases, a particular enzyme or regulatory polypeptide can be absent from a particular cell or tissue type or at particular stage of development. These differences can produce different splicing patterns for an RNA within a cell or tissue type or stage, thus giving rise to different populations of mRNAs. Such complexity can generate a number of protein products appropriate for particular cell types or developmental stages.

[0263] Alternatively spliced mRNAs can generate a variety of different polypeptides, also referred to herein as isoforms. Such isoforms can include polypeptides with deletions, additions and shortenings. For example, a portion of an open reading normally encoded by an exon can be removed in an alternatively spliced mRNA, thus resulting in a shorter polypeptide. An isoform can have amino acids removed at the N or C terminus or the deletion can be internal. An isoform can be missing a domain or a portion of a domain as a result of a deleted exon. Alternatively spliced mRNAs also can generate polypeptides with additional sequences. For example, a stop codon can be contained in an exon; when this exon is not included in an mRNA, the stop codon is not present and the open reading frame continues into the sequences contained in downstream exons. In such example, additional open reading frame sequences add additional amino acid sequence to a polypeptide and can include addition of a new domain or a portion thereof.

[0264] (i) Isoforms Generated by Intron Modification

[0265] Among the RAGE isoforms that can be generated by alternate RNA splicing patterns are isoforms generated through intron modification. In one example, a RAGE isoform is generated by alternative splicing such that one or more introns are retained compared to an mRNA transcript encoding a wildtype or predominant form of RAGE. The retention of one or more intron sequences can generate transcripts encoding RAGE isoforms that are shortened compared to a wildtype or predominant form of RAGE. A retained intron sequence can introduce a stop codon in the transcript and thus prematurely terminate the encoded polypeptide. A retained intron sequence also can introduce additional amino acids into a RAGE polypeptide, such as the insertion of one or more codons into a transcript such that one or more amino acids are inserted into a domain of RAGE. Intron retention includes the inclusion of a full or partial intron sequence into a transcript encoding a RAGE isoform. The retained intron sequence can introduce nucleotide sequence with codons in-frame to the surrounding exons or it can introduce a frame shift into the transcript. Exemplary nucleotide sequences of intron retention transcripts include SEQ ID NOS:5-9.

[0266] (ii) Isoforms Generated by Exon Modifications

[0267] RAGE isoforms can be generated by modification of an exon relative to a corresponding exon of an RNA transcript encoding a wildtype or predominant form of a RAGE polypeptide. Exon modifications include alternatively spliced RNA forms such as exon truncations, exon extensions, exon deletions and exon insertions. These alternatively spliced RNAs can encode RAGE isoforms which differ from a wildtype or predominant form of a RAGE polypeptide by including additional amino acids and/or by lacking amino acid sequences present in a wildtype or predominant form of a RAGE polypeptide.

[0268] Exon insertions are alternative spliced RNAs that contains at least one exon not typically present in an RNA encoding a wildtype or predominant form of a polypeptide. An inserted exon can operatively link additional amino acids encoded by the inserted exon to the other exons present in an RNA. An inserted exon also can contain one or more stop codons such that the RNA encoded polypeptide terminates as a result of such stop codons. If an exon containing such stop codons is inserted upstream of an exon that contains the stop codon used for polypeptide termination of a wildtype or predominant form of a polypeptide, a shortened polypeptide can be produced.

[0269] An inserted exon can maintain an open reading frame, such that when the exon is inserted, the RNA encodes an isoform containing an amino acid sequence of a wildtype or predominant form of a polypeptide with additional amino acids encoded by the inserted exon. An inserted exon can be inserted 5′, 3′ or internally in an RNA, such that additional amino acids encoded by the inserted exon are linked at the N terminus, C-terminus or internally, respectively in an isoform. An inserted exon also can change the reading frame of an RNA in which it is inserted, such that an isoform is produced that contains only a portion of the sequence of amino acids in a wildtype or predominant form of a polypeptide. Such isoforms can additionally contain amino acid sequence encoded by the inserted exon and also can terminate as a result of a stop codon contained in the inserted exon.

[0270] RAGE isoforms also can be produced from exon deletion events. An exon deletion refers to an event of alternative RNA splicing that produces a nucleic acid molecule that lacks at least one exon compared to an RNA encoding a wildtype or predominant form of a polypeptide. Deletion of an exon can produce a polypeptide of alternate size such as by removing sequences that encode amino acids as well as by changing the reading frame of an RNA encoding a polypeptide. An exon deletion can remove one or more amino acids from an encoded polypeptide; such amino acids can be N-terminal, C-terminal or internal to a polypeptide depending upon the location of the exon in an RNA sequence. Deletion of an exon in an RNA also can cause a shift in reading frame such that an isoform is produced containing one or more amino acids not present in a wildtype or predominant form of a polypeptide. A shift in reading frame also can result in a stop codon in the reading frame producing an isoform that terminates at a sequence different from that of a wildtype or predominant form of a polypeptide. In one example, a shift of reading frame produces an isoform that is shortened compared to a wildtype or predominant form of a polypeptide. Such shortened isoforms also can contain sequences of amino acids not present in a wildtype or predominant form of a polypeptide.

[0271] RAGE isoforms also can be produced by exon extension in an RNA. Exon extension is an event of alternative RNA splicing that produces a nucleic acid molecule that contains at least one exon that is greater in length (number of nucleotides contained in the exon) than the corresponding exon in an RNA encoding a wildtype or predominant form of a polypeptide. Additional sequence contained in an exon extension can encode additional amino acids and/or can contain a stop codon that terminates a polypeptide. An exon insertion containing an in-frame stop codon can produce a shortened isoform, that terminates in the sequence of the exon extension. An exon insertion also can shift the reading frame of an RNA, resulting in an isoform containing one or more amino acids not present in a wildtype or predominant form of a polypeptide and/or an isoform that terminates at a sequence different from that of a wildtype or predominant form of a polypeptide. An exon extension can include sequences contained in an intron of an RNA encoding a wildtype or predominant form of a polypeptide.

[0272] RAGE isoforms also can be produced by exon truncation. Exon truncations are RNA molecules that contain a shortening of one or more exons such that the one or more exons are shorter in length (number of nucleotides) compared to a corresponding exon in an RNA encoding a wildtype or predominant form of a polypeptide. An RNA molecule with an exon truncation can produce a polypeptide that is shortened compared to a wildtype or predominant form of a polypeptide. An exon truncation also can result in a shift in reading frame such that an isoform is produced containing one or more amino acids not present in a wildtype or predominant form of a polypeptide. A shift in reading frame also can result in a stop codon in the reading frame producing an isoform that terminates at a sequence different from that of a wildtype or predominant form of a polypeptide.

[0273] Alternatively spliced RNAs including exon modifications can produce RAGE isoforms that a lack a domain or a portion thereof and can produce RAGE isoforms that are reduced in or lack a biological activity. For example, exon modified RNAs can encode shortened RAGE polypeptides that lack a domain or portion thereof. Exon modified RNAs also can encode polypeptides where a domain is interrupted by inserted amino acids and/or by a shift in reading frame that interrupts a domain with one or more amino acids not present in a wildtype or predominant form of a polypeptide.

[0274] (b) In Silico Generated RAGE Isoforms

[0275] RAGE isoforms can be generated by in silico methods and synthetic and/or recombinant production to produce polypeptides that are modified compared to a wildtype or predominant form of a polypeptide. Typically, such RAGE isoforms have a modified sequence compared to a wildtype or predominant form. For example, RAGE isoforms are generated that are truncated. These truncated forms can have deletions internally, at the N-terminus, at the C-terminus or a combination thereof. RAGE isoforms also include lengthened forms that have additional amino acids internally, at the N-terminus, at the C-terminus or a combination thereof. For example, as is described further herein, by using available software programs, intron and exons, structures and encoded protein domains can be identified in a nucleic acid, such as a RAGE gene. Recombinant nucleic acid molecules encoding polypeptides can be synthesized that contain one or more exons and an intron or portion thereof. For example, recombinant molecules can contain one or more amino acids and/or a stop codon encoded by an intron, operatively linked to an exon, producing an isoform that has a modified intron-exon structure compared to a wildtype or predominant form of RAGE.

[0276] 2. RAGE Isoform Polypeptide Structure

[0277] The exemplary RAGE gene (see e.g., SEQ ID NO:325) includes 11 exons that contain protein coding sequence interrupted by 10 introns. In a wildtype or predominant form of RAGE such as set forth in SEQ ID NO:2, encoded by the nucleotide sequence set forth as SEQ ID NO:1, eleven exons are joined by RNA splicing to form a transcript encoding a 404 amino acid polypeptide that includes a signal sequence, three Ig-like domains, a transmembrane domain and a cytosolic domain. RAGE isoforms such as those described herein, can be generated by alternate splicing such that the splicing pattern of the RAGE is altered compared to the transcript encoding a wildtype or predominant form of RAGE.

[0278] A RAGE isoform includes receptor isoforms that lacks a domain or portion of a domain or that has a disruption in a domain such as by the insertion of one or more amino acids compared to a wildtype or predominant form of a RAGE receptor polypeptide. RAGE isoforms can contain a new domain and/or a function compared to a wildtype and/or predominant form of the receptor. The deletion, disruption and or insertion in the polypeptide sequence of a RAGE isoform is sufficient to alter an activity compared to that of a RAGE or change the structure compared to the RAGE, such as by elimination of one or more domains or by addition of a domain or portion thereof, such as one encoded by an intron in the RAGE gene.

[0279] RAGE isoforms can lack one or more domains or part of one or more domains compared to the polypeptide sequence of a wildtype or predominant form of the receptor. For example, a RAGE isoform can lack the cytosolic domain or part of the cytosolic domain. Such isoforms can lack some or all of amino acids set forth as amino acids 364-404 of SEQ ID NO:2. Exemplary RAGE isoforms lacking a cytosolic domain include SEQ ID NOs: 10-14. A RAGE isoform can lack the transmembrane domain or part of the transmembrane domain. Such isoforms can lack some or all of amino acids set forth as amino acids 343-363 of SEQ ID NO:2 Exemplary RAGE isoforms lacking a transmembrane domain include SEQ ID NOs: 10-14. A RAGE isoform can lack all or part of an Ig-like domain. In one example, an isoform lacks all or part of a C-type Ig-like domain. Such isoforms can include isoforms that lack the second and/or third Ig-like domains of the RAGE receptor (the two C-type domains). A RAGE isoform can lack part of the second Ig-like domain, all of the second Ig-like domain, part of the third Ig-like domain or all of the third Ig-like domain or a combination thereof. Exemplary RAGE isoforms lacking part or all of a C-type Ig-like domain include SEQ ID NOs: 10, 11, 13 and 14. A RAGE isoform also can lack part of or all of a V-type Ig-like domain.

[0280] A RAGE isoform can include a disruption in a domain such as by the insertion of one or more amino acids compared to the polypeptide sequence of a wildtype or predominant form of RAGE. For example, a RAGE isoform can include an insertion of one or more amino acids in the signal peptide, in a V-type Ig-like domain, in one or both of the C-type Ig-like domains, in the transmembrane domain and/or in the cytosolic domain. An exemplary RAGE isoform that contains an insertion of amino acids in a C-type Ig-like domain is set forth as SEQ ID NO: 13.

[0281] RAGE isoforms also can include RAGE polypeptide sequences that include the addition of a domain or a partial domain into the sequence. For example, a RAGE isoform can include the addition of amino acids at the C-terminus of the protein, where such amino acid sequence is not found in the wildtype and/or predominant form of RAGE. In one example, the additional amino acids can be intron-encoded amino acids due to the presence of a retained intron with the nucleic acid sequence of an isoform. Exemplary RAGE isoforms that include additional amino acid sequences at the C-terminal end of the polypeptide sequence include SEQ ID NOs: 10, 12, 13 and 14.

[0282] RAGE polypeptides also contain amino acids that are not formally part of a domain but are found in between designated domains (referred to herein as linking regions). RAGE isoforms also can include insertion, deletion and/or disruption in one or more linking regions. Exemplary RAGE isoforms include SEQ ID NOS: 10-14.

[0283] 3. RAGE Isoform Biological Activities

[0284] One or more biological activities can be altered in a RAGE isoform compared with a wildtype or predominant form of RAGE. Altered biological activities can include localization of the receptor, interaction with one or more ligands and/or altered signal transduction.

[0285] In one example, a RAGE isoform is altered in localization. For example, an isoform is lacking all of or part of the transmembrane domain of RAGE or has an insertion of one or more amino acids in the transmembrane domain of RAGE. Such isoforms can be altered in localization such that the isoform is not embedded in the membrane. For example, an isoform can be secreted extracellularly. It may be soluble and found for example intercellular spaces. Such isoforms also can be associated with the extracellular portion of the membrane or ECM such as through heparin sulfate binding.

[0286] In one example, a RAGE isoform is altered in ligand interaction. For example, an isoform is reduced in binding affinity for one or more ligands. In another example, an isoform is increased in affinity for one or more ligands. An isoform also can be altered in specificity of ligand binding. For example, an isoform can bind one ligand preferentially over other ligands, where such preferential binding is in comparison to the ligand specificity of a wildtype or predominant form of RAGE. A RAGE isoform can be altered in ligand endocytosis and/or transcytosis. A RAGE isoform also can be altered in its interaction with LF-L such that ligand binding is altered. Isoforms altered in ligand interaction can include isoforms that lack all or part of a V-type Ig-like domain or have a disruption of a V-type Ig-like domain. RAGE isoforms altered in ligand interaction also can include isoforms that have a conformational change compared to a wildtype or predominant form of RAGE.

[0287] RAGE isoforms can be altered in one or more facets of signal transduction. An isoform, compared with a wildtype or predominant form of RAGE can be altered in the modulation of one or more cellular responses, including inducing, augmenting, suppressing and preventing cellular responses to ligand, environmental conditions and other stimuli. Examples of cellular responses that can be altered in a RAGE isoform, include, but are not limited to, induction of neurite outgrowth, cytoskeletal reorganization, cellular oxidant stress induction, NF-κB modulation, triggering and modulation of pro-inflammatory responses, activation of the RAS-MAP kinase pathway, induction of cytokines, induction of growth factors such as VEGF, TNFα, and PDGF, induction of type IV collagen expression, induction of VCAM-1, ERK1/2 phosphorylation, EC migration, modulation of Rac, cdc42, Rho family of proteins, modulation of GTPases and modulating the expression from a RAGE promoter.

[0288] Generally, an activity is altered in an isoform at least 0.1, 0.5, 1, 2, 3, 4, 5, or 10 fold compared to a wildtype and/or predominant form of the receptor. Typically, an activity is altered 10, 20, 50, 100 or 1000 fold or more. For example, an isoform can be reduced in an activity compared to a wildtype and/or predominant form of the receptor. An isoform also can be increased in an activity compared to a wildtype and/or predominant form of a receptor. In assessing an activity of a RAGE isoform, the isoform can be compared with a wildtype and/or predominant form of RAGE. For example, a RAGE isoform can be altered in an activity compared to the RAGE polypeptide set forth as SEQ ID NO:2.

[0289] a. Negatively Acting and Inhibitory Isoforms

[0290] RAGE isoforms also can modulate an activity of another RAGE polypeptide. The modulated polypeptide can be a wildtype or predominant form of RAGE. A RAGE isoform also can modulate another RAGE isoform, such as a RAGE isoform expressed in a disease or condition. A RAGE isoform can interact directly or indirectly to modulate an activity a RAGE polypeptide. Such RAGE isoforms can act as negatively acting ligands by preventing or inhibiting one or more biological activities of a wildtype or predominant form of RAGE. A negatively acting ligand need not bind or affect the ligand binding domain of a receptor, nor affect ligand binding of the receptor.

[0291] A RAGE isoform also can indirectly modulate the activity of another RAGE form. In one example, a RAGE isoform competes with another RAGE form for ligand. Such isoforms can thus bind ligand and reduce the amount of ligand available to bind to other RAGE polypeptides. RAGE isoforms that bind and compete for one or more ligands of RAGE can include RAGE isoforms that do not participate in signal transduction or are reduced in their ability to participate in signal transduction compared to a cognate RAGE.

[0292] A negatively acting RAGE isoform that competes for ligand can include a ligand binding domain such as an Ig-like V-type domain of a cognate RAGE receptor. A negatively acting RAGE isoform can lack one or more domains, such that the isoform although bound to ligand does not modulate signal transduction. For example, such isoforms can lack an intracellular C-terminal domain. In one example, a RAGE isoforms lacks one or more amino acids of the C-terminal domain of the cognate receptor, for example, lacking one or more amino acids corresponding to amino acids 364-404 of the RAGE polypeptide set forth as SEQ ID NO:2. A dominant negative RAGE isoform also can lack all or part of a transmembrane domain. In one example, a RAGE isoforms lacks one or more amino acids corresponding to the transmembrane of the cognate receptor set forth as SEQ ID NO:2, such as one or more amino acids between amino acids 343-363 of SEQ ID NO:2. A negatively acting RAGE isoform can lack a part or all of one or more Ig-like type C domains. For example, a RAGE isoform lacks one or more amino acids or contains a disruption of the Ig-like C-type domain of the wildtype and/or predominant form of the RAGE receptor set forth as SEQ ID NO:2, corresponding to amino acids 124-221 and 227-317.

D. Methods for Identifying and Generating RAGE Isoforms

[0293] RAGE isoforms can be identified and produced by any of a variety of methods. For example, RAGE isoforms can be generated by analysis and identification of genes and expression products (RNAs) using cloning methods in combination with bioinformatics methods such as sequence alignments and domain mapping and selections.

[0294] Provided herein are methods for identifying and isolating RAGE isoforms that utilize cloning of expressed gene sequences and alignment with a gene sequence such as a genomic DNA sequence. Expressed sequences, such as cDNAs or regions of cDNAs, are isolated. Primers can be designed to amplify a cDNA or a region of a cDNA. In one example, primers are designed which overlap or flank the start codon of the open reading frame of a RAGE gene and primers are designed which overlap or flank the stop codon of the open reading frame. Primers can be used in PCR, such as in reverse transcriptase PCR (RT-PCR) with mRNA, to amplify nucleic acid molecules encoding open reading frames. Such nucleic acid molecules can be sequenced to identify those that encode an isoform. In one example, nucleic acid molecules of different sizes (e.g. molecular masses) from a predicted size (such as a size predicted for encoding a wildtype or predominant form) are chosen as candidate isoforms. Such nucleic acid molecules then can be analyzed, such by a method described herein, to further select isoform-encoding molecules having specified properties.

[0295] Computational analysis is performed using the obtained nucleic acid sequences to further select candidate isoforms. For example, cDNA sequences are aligned with a genomic sequence of a selected candidate gene. Such alignments can be performed manually or by using bioinformatics programs such as SIM4, a computer program for analysis of splice variants. Sequences with canonical donor-acceptor splicing sites (e.g. GT-AG) are selected. Molecules can be chosen which represent alternatively spliced products such as exon deletion, exon retention, exon extension and intron retention can be selected.

[0296] Sequence analysis of isolated nucleic acid molecules also can be used to further select isoforms that retain or lack a domain and/or a function compared to a wildtype or predominant form. For example, isoforms encoded by isolated nucleic acid molecules can be analyzed using bioinformatics programs such as described herein to identify protein domains. Isoforms then can be selected which retain or lack a domain or a portion thereof.

[0297] In one embodiment, isoforms are selected that lack a transmembrane domain or portion thereof sufficient to reduce or abolish membrane localization. For example, isoforms are selected that lack one or more amino acids of the transmembrane domain or have a disruption of the transmembrane domain such as an insertion of one or more amino acids. Such isoforms also can lack a cytosolic domain at the C-terminus of the receptor or have an altered C-terminal sequence compared to a wildtype or predominant form of RAGE. Isoforms also can be selected that lack a transmembrane domain or portion thereof and have one or more amino acids operatively linked in place of the missing domain or portion of a domain. Such isoforms can be the result of alternative splicing events such as exon extension, intron retention, exon deletion and exon insertion. In some cases, such alternatively spliced RNAs alter the reading frame of an RNA and/or operatively link sequences not found in an RNA encoding a wildtype or predominant form.

[0298] In another embodiment, isoforms lack at least one Ig-like domain or part of an Ig-like domain. For example, an isoform is selected that lacks a C-type Ig-like domain. Such isoforms can include those that lack one or more amino acids of the Ig-like domain closest to the C-terminus of RAGE. For example, RAGE isoforms can lack one or more of amino acids corresponding to amino acids 227-317 of SEQ ID NO:2. In one example, an isoform lacks a transmembrane domain and lacks all or part of the Ig-like domain closest to the C-terminus of RAGE. In another example, a RAGE isoform lacks all or part of both C-type Ig-like domains. Such isoforms also can lack a transmembrane domain. The isoforms can be the result of alternative splicing events such as exon extension, intron retention, exon deletion and exon insertion. In some case, such alternatively spliced RNAs alter the reading frame of an RNA and/or operatively link sequences not found in an RNA encoding a wildtype or predominant form. Such isoforms can include additional amino acid sequences not found in a wildtype or predominant form of RAGE. For example, additional amino acids can include intron-encoded amino acids. In one example, additional amino acid sequence is contained at the C-terminus of a RAGE isoform.

[0299] Nucleic acid molecules can be selected which encode A RAGE isoform and have an activity that differs from a wildtype or predominant form of RAGE. In one example, RAGE isoforms are selected that lack a transmembrane domain such that the isoforms are not membrane localized and are secreted from a cell. In another example, RAGE isoforms are selected that lack all or part of at least one Ig-like domain and that are altered in one or more biological activities including ligand interactions and signal transduction.

E. Exemplary RAGE Isoforms

[0300] Provided herein are exemplary RAGE isoforms that have an altered domain organization compared to a cognate RAGE due to the retention of an intron-encoded sequence in the nucleic acid molecule that encodes the RAGE isoform. Provided herein are exemplary RAGE isoforms that lack one or more domains or parts of domains of RAGE.

[0301] RAGE isoforms provided herein are encoded by nucleic acid molecules that include all or a portion of any one or more introns of RAGE, operatively linked to an exon. The intron portion can include one codon, including a stop codon, which results in RAGE isoform that ends at the end of the exon, or can include more codons so that the RAGE isoform includes intron encoded residues.

[0302] In the exemplary genomic sequence of RAGE set forth in SEQ ID NO:325, such introns include intron 1 containing nucleotides 755-937, intron 2 containing nucleotides 1045-1174, intron 3 containing nucleotides 1371-1536, intron 4 containing nucleotides 1602-1723, intron 5 containing nucleotides 1812-1901, intron 6 containing nucleotides 2085-2226, intron 7 containing nucleotides 2358-2536, intron 8 containing nucleotides 2779-3292, intron 9 containing nucleotides 3320-3447, and intron 10 containing nucleotides 3575-3685. An intron-encoded portion of an isoform can exist N-terminally, C-terminally, or internally to an exon sequence(s) operatively linked to the intron. An isoform includes intron-encoded amino acids from any one or more of introns 1, 2, 3, 4, 5, 6, 7, 8, 9, or 10 internally within the isoform, or at the N- or C-terminus or the isoform is truncated at the end of an exon.

[0303] Among the RAGE isoforms provided herein is isoform A05 set forth as SEQ ID NO:10, and the encoding nucleic acid sequence set forth as SEQ ID NO: 5. Clone A05 contains 928 bases, including an intron portion encoding the C-terminal-portion of the RAGE polypeptide. The intron portion contains the first 92 nucleotides of intron 3. The intron 3 portion encodes twenty eight amino acids followed by a stop codon. In the clone this portion is operatively linked to an open reading frame of exons 1-3. The encoded RAGE isoform is truncated compared to the cognate RAGE and includes the twenty eight additional intron encoded amino acids at the C-terminus. A05 is a 146 amino acid polypeptide. It contains a signal sequence at the N-terminus at amino acids 1-22 and an Ig-like V-type domain following the signal sequence at amino acids 23-116. The A05 RAGE isoform lacks both C-type Ig like domains compared to a cognate RAGE such as set forth in SEQ ID NO:2. It also lacks a transmembrane domain and also the C-terminal amino acids found in the cognate receptor. Isoform A05 includes an additional (i.e. intron-encoded) 28 amino acids at the C-terminus of the polypeptide not present in the cognate RAGE set forth as SEQ ID NO: 2.

[0304] Provided herein is an exemplary RAGE isoform C02, set forth as SEQ ID NO:13, and encoded by a nucleic acid sequence set forth as SEQ ID NO:8. Clone C02 contains 994 bases, including two intron portions encoding portions of the RAGE isoform polypeptide. The first intron portion contains the first 48 nucleotides of intron 4. The intron 4 portion encodes sixteen amino acids that are not present in the cognate RAGE. Thus, the resultant polypeptide contains an insertion of sixteen amino acids within the Ig-like C1 domain. In the clone this portion is operatively linked between an open reading frame of exons 1-4 and exon 5. In addition, clone C02 also contains a second intron portion which contains the first 75 nucleotides of intron 6. The intron 6 portion encodes twenty amino acids followed by a stop codon. In the clone this portion is operatively linked to an open reading frame following exon 6. The encoded RAGE isoform is truncated compared to the cognate RAGE and includes the twenty additional intron encoded amino acids at the C-terminus. C02 contains 266 amino acids. This isoform includes an N-terminal signal sequence at amino acids 1-22, followed by a V-type Ig-like domain at amino acids 23-116 and one C-type Ig-like domain at amino acids 124-237. It lacks a second C-type Ig-like domain except for the first 4 amino acids (amino acids 243-246) corresponding to amino acids 227-230 of SEQ ID NO:2. In addition, the first C-type Ig-like domain included in C02 contains a disruption. An additional (i.e. intron encoded) 16 amino acids are inserted; these 16 amino acids are positions 142-157 of SEQ ID NO:13. The insertion point for these amino acids corresponds to amino acids 141-142 of SEQ ID NO:2. C02 isoform contains an additional (i.e. intron encoded) 20 amino acids at the C-terminus of the polypeptide, amino acids 247-266 not present in the cognate RAGE.

[0305] Another exemplary RAGE isoform encoded by clone C06 is provided. The encoding nucleic acid sequence is set forth in SEQ ID NO: 7, and encodes a polypeptide having a sequence of amino acids set forth in SEQ ID NO:12. Clone C06 contains 1165 bases, including an intron portion encoding the C-terminal-portion of the RAGE polypeptide. The intron portion contains the first 201 nucleotides of intron 8. The intron 8 portion encodes sixty six amino acids followed by a stop codon. In the clone this portion is operatively linked to an open reading frame of exons 1-8. The encoded RAGE isoform is truncated compared to the cognate RAGE and includes the sixty six additional intron encoded amino acids at the C-terminus. Isoform C06, set forth as SEQ ID NO:12, is a RAGE isoform that is 387 amino acids in length and contains an N-terminal signal sequence at amino acids 1-22, a V-type Ig-like domains at amino acids 23-116 and two C-type Ig-like domains (amino acids 124-221 and amino acids 227-317). This isoform lacks a transmembrane domain and the amino acids present at the C-terminus of cognate RAGE. Compared with a cognate RAGE set forth in SEQ ID NO:2, the C06 isoform contains a deletion of amino acids 322-404. C06 isoform contains an additional (i.e. intron encoded) 66 amino acids following the second C-type Ig-like domain (amino acids 322-387) that are not found in the cognate RAGE.

[0306] Another exemplary RAGE isoform, F06, is set forth as SEQ ID NO:11, and is encoded by a nucleic acid sequence set forth as SEQ ID NO:6. Clone F06 contains 941 bases, including an intron portion at the C-terminus containing the first 24 nucleotides of intron 5. The intron 5 portion encodes a stop codon that is operatively linked with an open reading frame of exons 1-5 of the encoded polypeptide thereby resulting in a RAGE isoform that is truncated compared to a cognate RAGE. The F06 isoform is 172 amino acids in length, including the signal sequence. The F06 isoform contains an N-terminal signal sequence at amino acids 1-22, and a V-type Ig-like domain at amino acids 23-116. It contains part of the first C-type Ig-like domain, amino acids 124-172, corresponding to amino acids 124-172 of SEQ ID NO:2. Additionally, it can contains an amino acid replacement of glutamic acid for valine at the position corresponding to amino acid 171 of SEQ ID NO:2. F06 isoform lacks a second C-type Ig-like domain, a transmembrane domain and the C-terminal cytosolic domain.

[0307] Also provided herein is an exemplary RAGE isoform C08 having a nucleic acid sequence set forth in SEQ ID NO:9 and encoding a 173 amino acid polypeptide set forth as SEQ ID NO:14. Clone C08 contains 1415 bases, including three intron portions encoding portions of the RAGE isoform polypeptide. The first intron portion includes the entire sequence of intron 4 operatively linked between the open reading frame of exons 1-4 and exon 5. The intron 4 portion encodes thirty two amino acids followed by a stop codon, resulting in a RAGE isoform that is truncated compared to a cognate RAGE. Thus, the remainder of the nucleotide sequence of clone C08 is non-coding, but contains retained intron 6 and intron 9 sequences. The 173 amino acid sequence of clone C08 contains an N-terminal signal sequence at amino acids 1-22 and a V-type Ig-like domain at amino acids 23-116. Isoform C08 contains part of the first C-type Ig-like domain corresponding to amino acids 124-141 of SEQ ID NO:2. C08 isoform lacks a second C-type Ig-like domain and a transmembrane domain. It also does not contain the C-terminal amino acids corresponding to amino acids 364-404 of SEQ ID NO:2. Isoform C08 has an additional 32 amino acids at its C-terminus, amino acids 142-174 that are not found in the cognate RAGE.

[0308] 1. Allelic Variants of Isoforms

[0309] Allelic variants and species variants of RAGE isoforms can be generated or identified. Such variants differ in one or more amino acids from a particular RAGE isoform or cognate RAGE. Allelic variation occurs among members of a population and species variation occurs between species. For example, isoforms can be derived from different alleles of a gene; each allele can have one or more amino acid differences from the other. Such alleles can have conservative and/or non-conservative amino acid differences. Allelic variants also include isoforms produced or identified from different subjects, such as individual subjects or animal models or other animals. Amino acid changes can result in modulation of an isoform biological activity. In some cases, an amino acid difference can be “silent,” having no or virtually no detectable effect on a biological activity. Allelic variants of isoforms also can be generated by mutagenesis. Such mutagenesis can be random or directed. For example, allelic variant isoforms can be generated that alter amino acid sequences or a potential glycosylation site to effect a change in glycosylation of an isoform, including alternate glycosylation, increased or inhibition of glycosylation at a site in an isoform. Allelic variant isoforms can be at least 90% identical in sequence to an isoform. Generally, an allelic variant isoform from the same species is at least 95%, 96%, 97%, 98%, 99% identical to an isoform, typically an allelic variant is 98%, 99%, 99.5% identical to an isoform.

[0310] For example, RAGE isoforms, including RAGE isoforms provided herein, can include allelic variation in the RAGE polypeptide. Exemplary allelic variants of RAGE are set forth in Table 3. Exemplary allelic variants of a cognate RAGE nucleotide or amino acid sequence are denoted in SEQ ID NOS: 3 and 4. Thus, a RAGE isoform can include one or more amino acid differences present in an allelic variant of a cognate RAGE. For example, a RAGE isoform can have any one or more allelic variations corresponding to those denoted in SEQ ID NO: 3 or 4. RAGE isoforms also include species variants of a cognate RAGE.

TABLE 3

| | | Nucleotide | | |
|---|---|---|---|---|
| Polymorphism | SNP NO: | change | | Amino acid change |
| NT 30 | 1800684 | 30 | A/T | none |
| NT 182 | 2555465 | 182 | T/A | none |
| NT 268 | 2070600 | 268 | G/A | AA 82 G/S |
| NT 380 | 17846807 | 380 | A/G | none |
| NT 847 | 17846800 | 847 | G/T | none |
| NT 113 | 3176931 | 1130 | G/A | AA 369 R/Q |
| AA 365 | | | | AA 365 R/S |
| AA 369 | | | | AA 369 R/G |
| AA 77 | | | | AA 77 R/C |
| AA 305 | | | | AA 305 H/Q |
| AA 307 | | | | AA 307 S/C |

F. Methods of Producing Nucleic Acid Encoding RAGE Isoforms and Methods of Producing RAGE Polypeptides

[0311] Exemplary methods for generating RAGE isoform nucleic acid molecules and polypeptides are provided herein. Such methods include molecular biology techniques known to one of skill in the art. For example, such methods include in vitro synthesis methods for nucleic acid molecules such as PCR, synthetic gene construction and in vitro ligation of isolated and/or synthesized nucleic acid fragments. RAGE isoform nucleic acid molecules also can be isolated by cloning methods, including PCR of RNA and DNA isolated from cells and screening of nucleic acid molecule libraries by hybridization and/or expression screening methods.

[0312] RAGE isoform polypeptides can be generated from RAGE isoform nucleic acid molecules using in vitro and in vivo synthesis methods. RAGE isoforms can be expressed in any organism suitable to produce the required amounts and forms of isoform needed for administration and treatment. Expression hosts include prokaryotic and eukaryotic organisms such as E. coli, yeast, plants, insect cells, mammalian cells, including human cell lines and transgenic animals. RAGE isoforms also can be isolated from cells and organisms in which they are expressed, including cells and organisms in which isoforms are produced recombinantly and those in which isoforms are synthesized without recombinant means such as genomically-encoded isoforms produced by alternative splicing events.

[0313] 1. Synthetic Genes and Polypeptides

[0314] RAGE isoform nucleic acid molecules and polypeptides can be synthesized by methods known to one of skill in the art using synthetic gene synthesis. In such methods, a polypeptide sequence of a RAGE isoform is “back-translated” to generate one or more nucleic acid molecules encoding an isoform. The back-translated nucleic acid molecule is then synthesized as one or more DNA fragments such as by using automated DNA synthesis technology. The fragments are then operatively linked to form a nucleic acid molecule encoding an isoform. Nucleic acid molecules also can be joined with additional nucleic acid molecules such as vectors, regulatory sequences for regulating transcription and translation and other polypeptide-encoding nucleic acid molecules. Isoform-encoding nucleic acid molecules also can be joined with labels such as for tracking, including radiolabels, and fluorescent moieties.

[0315] The process of backtranslation uses the genetic code to obtain a nucleotide gene sequence for any polypeptide of interest, such as a RAGE isoform. The genetic code is degenerate, 64 codons specify 20 amino acids and 3 stop codons. Such degeneracy permits flexibility in nucleic acid design and generation, allowing for example restriction sites to be added to facilitate the linking of nucleic acid fragments and the placement of unique identifier sequences within each synthesized fragment. Degeneracy of the genetic code also allows the design of nucleic acid molecules to avoid unwanted nucleotide sequences, including unwanted restriction sites, splicing donor or acceptor sites, or other nucleotide sequences potentially detrimental to efficient translation. Additionally, organisms sometimes favor particular codon usage and/or a defined ratio of GC to AT nucleotides. Thus, degeneracy of the genetic code permits design of nucleic acid molecules tailored for expression in particular organisms or groups of organisms. Additionally, nucleic acid molecules can be designed for different levels of expression based on optimizing (or non-optimizing) of the sequences. Back-translation is performed by selecting codons that encode a polypeptide. Such processes can be performed manually using a table of the genetic code and a polypeptide sequence. Alternatively, computer programs, including publicly available software can be used to generate back-translated nucleic acid sequences.

[0316] To synthesize a back-translated nucleic acid molecule, any method available in the art for nucleic acid synthesis can be used. For example, individual oligonucleotides corresponding to fragments of a RAGE isoform-encoding sequence of nucleotides are synthesized by standard automated methods and mixed together in an annealing or hybridization reaction. Such oligonucleotides are synthesized such annealing results in the self-assembly of the gene from the oligonucleotides using overlapping single-stranded overhangs formed upon duplexing complementary sequences, generally about 100 nucleotides in length. Single nucleotide “nicks” in the duplex DNA are sealed using ligation, for example with bacteriophage T4 DNA ligase. Restriction endonuclease linker sequences can for example, then be used to insert the synthetic gene into any one of a variety of recombinant DNA vectors suitable for protein expression. In another, similar method, a series of overlapping oligonucleotides are prepared by chemical oligonucleotide synthesis methods. Annealing of these oligonucleotides results in a gapped DNA structure. DNA synthesis catalyzed by enzymes such as DNA polymerase I can be used to fill in these gaps, and ligation is used to seal any nicks in the duplex structure. PCR and/or other DNA amplification techniques can be applied to amplify the formed linear DNA duplex.

[0317] Additional nucleotide sequences can be joined to a RAGE isoform-encoding nucleic acid molecule, including inker sequences containing restriction endonuclease sites for the purpose of cloning the synthetic gene into a vector, for example, a protein expression vector or a vector designed for the amplification of the core protein coding DNA sequences. Furthermore, additional nucleotide sequences specifying functional DNA elements can be operatively linked to an isoform-encoding nucleic acid molecule. Examples of such sequences include, but are not limited to, promoter sequences designed to facilitate intracellular protein expression, and secretion sequences designed to facilitate protein secretion. Additional nucleotide sequences such as sequences specifying protein binding regions also can be linked to isoform-encoding nucleic acid molecules. Such regions include, but are not limited to, sequences to facilitate uptake of an isoform into specific target cells, or otherwise enhance the pharmacokinetics of the synthetic gene.

[0318] RAGE isoforms also can be synthesized using automated synthetic polypeptide synthesis. Cloned and/or in silico-generated polypeptide sequences can be synthesized in fragments and then chemically linked. Alternatively, isoforms can be synthesized as a single polypeptide. Such polypeptides then can be used in the assays and treatment administrations described herein.

[0319] 2. Methods of Cloning and Isolating RAGE Isoforms

[0320] RAGE isoforms can be cloned or isolated using any available methods known in the art for cloning and isolating nucleic acid molecules. Such methods include PCR amplification of nucleic acids and screening of libraries, including nucleic acid hybridization screening, antibody-based screening and activity-based screening.

[0321] Methods for amplification of nucleic acids can be used to isolate nucleic acid molecules encoding an isoform, include for example, polymerase chain reaction (PCR) methods. A nucleic acid containing material can be used as a starting material from which an isoform-encoding nucleic acid molecule can be isolated. For example, DNA and mRNA preparations, cell extracts, tissue extracts, fluid samples (e.g. blood, serum, saliva), samples from healthy and/or diseased subjects can be used in amplification methods. Nucleic acid libraries also can be used as a source of starting material. Primers can be designed to amplify an isoform. For example, primers can be designed based on expressed sequences from which an isoform is generated. Primers can be designed based on back-translation of an isoform amino acid sequence. Nucleic acid molecules generated by amplification can be sequenced and confirmed to encode an isoform.

[0322] Nucleic acid molecules encoding isoforms also can be isolated using library screening. For example, a nucleic acid library representing expressed RNA transcripts as cDNAs can be screened by hybridization with nucleic acid molecules encoding RAGE isoforms or portions thereof. For example, an intron sequence or portion thereof from a RAGE gene can be used to screen for intron retention containing molecules based on hybridization to homologous sequences. Expression library screening can be used to isolate nucleic acid molecules encoding a RAGE isoform. For example, an expression library can be screened with antibodies that recognize a specific isoform or a portion of an isoform. Antibodies can be obtained and/or prepared which specifically bind a RAGE isoform or a region or peptide contained in an isoform. Antibodies which specifically bind an isoform can be used to screen an expression library containing nucleic acid molecules encoding an isoform.

[0323] Methods of preparing and isolating antibodies, including polyclonal and monoclonal antibodies and fragments therefrom are well known in the art. Methods of preparing and isolating recombinant and synthetic antibodies also are well known in the art. For example, such antibodies can be constructed using solid phase peptide synthesis or can be produced recombinantly, using nucleotide and amino acid sequence information of the antigen binding sites of antibodies that specifically bind a candidate polypeptide. Antibodies also can be obtained by screening combinatorial libraries containing of variable heavy chains and variable light chains, or of antigen-binding portions thereof. Methods of preparing, isolating and using polyclonal, monoclonal and non-natural antibodies are reviewed, for example, in Kontermann and Dubel, eds. (2001) “Antibody Engineering” Springer Verlag; Howard and Bethell, eds. (2001) “Basic Methods in Antibody Production and Characterization” CRC Press; and O'Brien and Aitkin, eds. (2001) “Antibody Phage Display” Humana Press. Such antibodies also can be used to screen for the presence of an isoform polypeptide, for example, to detect the expression of a RAGE isoform in a cell, tissue or extract.

[0324] 3. Expression Systems

[0325] RAGE isoforms can be produced by any method known to those of skill in the art including in vivo and in vitro methods. RAGE isoforms can be expressed in any organism suitable to produce the required amounts and forms of RAGE isoforms needed for administration and treatment. Expression hosts include prokaryotic and eukaryotic organisms such as E. coli, yeast, plants, insect cells, mammalian cells, including human cell lines and transgenic animals. Expression hosts can differ in their protein production levels as well as the types of post-translational modifications that are present on the expressed proteins. The choice of expression host can be made based on these and other factors, such as regulatory and safety considerations, production costs and the need and methods for purification.

[0326] Many expression vectors are available and known to those of skill in the art and can be used for expression of RAGE isoforms. The choice of expression vector is influenced by the choice of host expression system. In general, expression vectors can include transcriptional promoters and optionally enhancers, translational signals, and transcriptional and translational termination signals. Expression vectors that are used for stable transformation typically have a selectable marker which allows selection and maintenance of the transformed cells. In some cases, an origin of replication can be used to amplify the copy number of the vector.

[0327] RAGE isoforms also can be utilized or expressed as protein fusions. For example, an isoform fusion can be generated to add additional functionality to an isoform. Examples of isoform fusion proteins include, but are not limited to, fusions of a signal sequence, a tag such as for localization, e.g. a his₆ tag or a myc tag, or a tag for purification, for example, a GST fusion, and a sequence for directing protein secretion and/or membrane association.

[0328] a. Prokaryotic Expression

[0329] Prokaryotes, especially E. coli, provide a system for producing large amounts of proteins such as RAGE isoforms. Transformation of E. coli is simple and rapid technique well known to those of skill in the art. Expression vectors for E. coli can contain inducible promoters, such promoters are useful for inducing high levels of protein expression and for expressing proteins that exhibit some toxicity to the host cells. Examples of inducible promoters include the lac promoter, the trp promoter, the hybrid tac promoter, the T7 and SP6 RNA promoters and the temperature regulated λPL promoter.

[0330] Isoforms can be expressed in the cytoplasmic environment of E. coli. The cytoplasm is a reducing environment and for some molecules, this can result in the formation of insoluble inclusion bodies. Reducing agents such as dithiothreotol and β-mercaptoethanol and denaturants, such as guanidine-HCl and urea can be used to resolubilize the proteins. An alternative approach is the expression of RAGE isoforms in the periplasmic space of bacteria which provides an oxidizing environment and chaperonin-like and disulfide isomerases and can lead to the production of soluble protein. Typically, a leader sequence is fused to the protein to be expressed which directs the protein to the periplasm. The leader is then removed by signal peptidases inside the periplasm. Examples of periplasmic-targeting leader sequences include the pelB leader from the pectate lyase gene and the leader derived from the alkaline phosphatase gene. In some cases, periplasmic expression allows leakage of the expressed protein into the culture medium. The secretion of proteins allows quick and simple purification from the culture supernatant. Proteins that are not secreted can be obtained from the periplasm by osmotic lysis. Similar to cytoplasmic expression, in some cases proteins can become insoluble and denaturants and reducing agents can be used to facilitate solubilization and refolding. Temperature of induction and growth also can influence expression levels and solubility, typically temperatures between 25° C. and 37° C. are used. Typically, bacteria produce aglycosylated proteins. Thus, if proteins require glycosylation for function, glycosylation can be added in vitro after purification from host cells.

[0331] b. Yeast

[0332] Yeasts such as Saccharomyces cerevisae, Schizosaccharomyces pombe, Yarrowia lipolytica, Kluyveromyces lactis and Pichia pastoris are well known yeast expression hosts that can be used for production of RAGE isoforms. Yeast can be transformed with episomal replicating vectors or by stable chromosomal integration by homologous recombination. Typically, inducible promoters are used to regulate gene expression. Examples of such promoters include GAL1, GAL7 and GAL5 and metallothionein promoters, such as CUP1, AOX1 or other Pichia or other yeast promoter. Expression vectors often include a selectable marker such as LEU2, TRP1, HIS3 and URA3 for selection and maintenance of the transformed DNA. Proteins expressed in yeast often are soluble. Co-expression with chaperonins such as Bip and protein disulfide isomerase can improved expression levels and solubility. Additionally, proteins expressed in yeast can be directed for secretion using secretion signal peptide fusions such as the yeast mating type alpha-factor secretion signal from Saccharomyces cerevisae and fusions with yeast cell surface proteins such as the Aga2p mating adhesion receptor or the Arxula adeninivorans glucoamylase. A protease cleavage site such as for the Kex-2 protease, can be engineered to remove the fused sequences from the expressed polypeptides as they exit the secretion pathway. Yeast also is capable of glycosylation at Asn-X-Ser/Thr motifs.

[0333] c. Insect Cells

[0334] Insect cells, particularly using baculovirus expression, are useful for expressing polypeptides such as RAGE isoforms. Insect cells express high levels of protein and are capable of most of the post-translational modifications used by higher eukaryotes. Baculovirus have a restrictive host range which improves the safety and reduces regulatory concerns of eukaryotic expression. Typical expression vectors use a promoter for high level expression such as the polyhedrin promoter of baculovirus. Commonly used baculovirus systems include the baculoviruses such as Autographa californica nuclear polyhedrosis virus (AcNPV), and the bombyx mori nuclear polyhedrosis virus (BmNPV) and an insect cell line such as Sf9 derived from Spodoptera frugiperda, Pseudaletia unipuncta (A7S) and Danaus plexippus (DpN1). For high-level expression, the nucleotide sequence of the molecule to be expressed is fused immediately downstream of the polyhedrin initiation codon of the virus. Mammalian secretion signals are accurately processed in insect cells and can be used to secrete the expressed protein into the culture medium. In addition, the cell lines Pseudaletia unipuncta (A7S) and Danaus plexippus (DpN1) produce proteins with glycosylation patterns similar to mammalian cell systems.

[0335] An alternative expression system in insect cells is the use of stably transformed cells. Cell lines such as the Schnieder 2 (S2) and Kc cells (Drosophila melanogaster) and C7 cells (Aedes albopictus) can be used for expression. The Drosophila metallothionein promoter can be used to induce high levels of expression in the presence of heavy metal induction with cadmium or copper. Expression vectors are typically maintained by the use of selectable markers such as neomycin and hygromycin.

[0336] d. Mammalian Cells

[0337] Mammalian can be used to express RAGE isoforms. Expression constructs can be transferred to mammalian cells by viral infection such as adenovirus or by direct DNA transfer such as liposomes, calcium phosphate, DEAE-dextran and by physical means such as electroporation and microinjection. Expression vectors for mammalian cells typically include an mRNA cap site, a TATA box, a translational initiation sequence (Kozak consensus sequence) and polyadenylation elements. Such vectors often include transcriptional promoter-enhancers for high-level expression, for example the SV40 promoter-enhancer, the human cytomegalovirus (CMV) promoter and the long terminal repeat of Rous sarcoma virus (RSV). These promoter-enhancers are active in many cell types. Tissue and cell-type promoters and enhancer regions also can be used for expression. Exemplary promoter/enhancer regions include, but are not limited to, those from genes such as elastase I, insulin, immunoglobulin, mouse mammary tumor virus, albumin, alpha fetoprotein, alpha 1 antitrypsin, beta globin, myelin basic protein, myosin light chain 2, and gonadotropic releasing hormone gene control. Selectable markers can be used to select for and maintain cells with the expression construct. Examples of selectable marker genes include, but are not limited to, hygromycin B phosphotransferase, adenosine deaminase, xanthine-guanine phosphoribosyl transferase, aminoglycoside phosphotransferase, dihydrofolate reductase and thymidine kinase. Fusion with cell surface signaling molecules such as TCR-ζ and Fc_{ε}RI-γ can direct expression of the proteins in an active state on the cell surface.

[0338] Many cell lines are available for mammalian expression including mouse, rat human, monkey, chicken and hamster cells. Exemplary cell lines include but are not limited to CHO, Balb/3T3, HeLa, MT2, mouse NSO (nonsecreting) and other myeloma cell lines, hybridoma and heterohybridoma cell lines, lymphocytes, fibroblasts, Sp2/0, COS, NIH3T3, HEK293, 293S, 2B8, and HKB cells. Cell lines also are available adapted to serum-free media which facilitates purification of secreted proteins from the cell culture media. One such example is the serum free EBNA-1 cell line (Pham et al., (2003) Biotechnol. Bioeng. 84:332-42.)

[0339] e. Plants

[0340] Transgenic plant cells and plants can be to express RAGE isoforms. Expression constructs are typically transferred to plants using direct DNA transfer such as microprojectile bombardment and PEG-mediated transfer into protoplasts, and with agrobacterium-mediated transformation. Expression vectors can include promoter and enhancer sequences, transcriptional termination elements and translational control elements. Expression vectors and transformation techniques are usually divided between dicot hosts, such as Arabidopsis and tobacco, and monocot hosts, such as corn and rice. Examples of plant promoters used for expression include the cauliflower mosaic virus promoter, the nopaline syntase promoter, the ribose bisphosphate carboxylase promoter and the ubiquitin and UBQ3 promoters. Selectable markers such as hygromycin, phosphomannose isomerase and neomycin phosphotransferase often are used to facilitate selection and maintenance of transformed cells. Transformed plant cells can be maintained in culture as cells, aggregates (callus tissue) or regenerated into whole plants. Transgenic plant cells also can include algae engineered to produce RAGE isoforms (see for example, Mayfield et al. (2003) PNAS 100:438-442). Because plants have different glycosylation patterns than mammalian cells, this can influence the choice of RAGE isoforms produced in these hosts.

G. Isoform Conjugates

[0341] A variety of synthetic conjugates of RAGE isoforms are provided. A RAGE conjugate includes all or part of a RAGE polypeptide or isoform, such as a domain, intron-encoded portion, or ligand-binding portion, joined or paired with another molecule. For example, a RAGE isoform can be joined to all or part of another polypeptide or isoform, such as a domain or ligand-binding portion of another polypeptide. In some examples, a RAGE isoform containing only the extracellular ligand binding domain of a RAGE polypeptide is joined to another polypeptide that also contains only the extracellular ligand binding domain. In other instances, a RAGE isoform, such as one generated by alternative splicing as provided herein is joined to all or part of another polypeptide or molecule. The joining of the molecules can be by linkage, such as by direct or indirect linkage. In some instances, a RAGE chimeric molecule is generated where a nucleotide sequence encoding all or part of a RAGE polypeptide or isoform is fused to another nucleotide sequence encoding the same or different protein. In other instances, the conjugate is the result of covalently coupling a RAGE polypeptide or isoform to another moiety, such as for example, to a targeting agent, a fluorescent moiety, a tag, a polyethylene glycol moiety, or any other moiety known to those of skill in the art.

[0342] In one example, RAGE isoforms are provided as fusion proteins linked directly or indirectly to a nucleic acid molecule encoding another polypeptide, such as a polypeptide that promotes secretion of an isoform. In some examples, a fusion protein can result in a chimeric polypeptide. For example, a chimera can include a polypeptide in which the extracellular domain portion and C-terminal portion, such as an intron encoded portion, are from different isoforms. In another example, a fusion protein containing, for example, a multimerization domain, can result in a homodimeric or heterodimeric molecule.

[0343] Also included among synthetic forms are conjugates in which a RAGE isoform, or intron-encoded portion thereof, is linked directly or via a linker to another agent, such as a targeting agent or target agent or to any other molecule that presents a RAGE isoform or intron-encoded portion of a RAGE isoform to cell surface receptor (CSR), such as to RAGE, so that an activity of the CSR is modulated. Also provided are “peptidomimetic” isoforms in which one or more bonds in the peptide backbone is (are) replaced by a bioisotere or other bond such that the resulting polypeptide peptidomimetic has improved properties, such as resistance to proteases, compared to the unmodified form.

[0344] RAGE isoform conjugates can be designed and produced with one or more modified properties. These properties include, but are not limited to, increased production including increased secretion or expression. For example, a RAGE isoform can be modified to exhibit improved secretion compared to an unmodified RAGE isoform. Other properties include increased protein stability, such as an increased protein half-life, increased thermal tolerance and/or resistance to one or more proteases. For example, a RAGE isoform can be modified to increase protein stability in vitro and/or in vivo. In vivo stability can include protein stability under particular administration conditions such as stability in blood, saliva, and/or digestive fluids.

[0345] RAGE isoforms also can be modified to exhibit modified properties without producing a conjugated polypeptide using any methods known in the art for modification of proteins. Such methods can include site-directed and random mutagenesis. Non-natural amino acids and/or non-natural covalent bonds between amino acids of the polypeptide can be introduced into a RAGE isoform to increase protein stability. In such modified RAGE isoforms, the biological function of the isoform can remain unchanged compared to the unmodified isoform. In some examples, a modified RAGE isoform also can be provided as a conjugate such as a fusion protein, chimeric protein, or other conjugate provided herein. Assays such as the assays for biological function provided herein and known in the art can be used to assess the biological function of a modified RAGE isoform.

[0346] Linkage of a synthetic RAGE isoform as a fusion protein or synthetic conjugate can be direct or indirect. In some examples, linkage can be facilitated by nucleic acid linkers such as restriction enzyme linkers, or other peptide linkers that promote the folding or stability of an encoded polypeptide. Linkage of a polypeptide conjugate also can be by chemical linkage or facilitated by heterobifunctional linkers, such as any known in the art or provided herein. Exemplary peptide linkers and heterobifunctional cross-linking reagents are provided below. For example, Exemplary linkers include, but are not limited to, (Gly4Ser)n, (Ser4Gly)n and (AlaAlaProAla)n (see, SEQ ID NO. 319) in which n is 1 to 6, such as 1, 2, 3 or 4, such as:

| | |
|---|---|
| (1) | Gly4Ser with NcoI ends SEQ ID NO. 320 |
| | CCATGGGCGG CGGCGGCTCT GCCATGG |
| (2) | (Gly4Ser)2 with NcoI ends SEQ ID NO. 321 |
| | CCATGGGCGG CGGCGGCTCT GGCGGCGGCG GCTCTGCCAT GG |
| (3) | (Ser4Gly)4 with NcoI ends SEQ ID NO. 322 |
| | CCATGGCCTC GTCGTCGTCG GGCTCGTCGT CGTCGGGCTC |
| | GTCGTCGTCG GGCTCGTCGT CGTCGGGCGC CATGG |
| (4) | (Ser4Gly)2 with NcoI ends SEQ ID NO. 323 |
| | CCATGGCCTC GTCGTCGTCG GGCTCGTCGT CGTCGGGCGC |
| | CATGG |
| (5) | (AlaAlaProAla)n, where n is 1 to 4, such as 2 |
| | or 3 (see, SEQ ID NO.:324) |

[0347] Numerous heterobifunctional cross-linking reagents that are used to form covalent bonds between amino groups and thiol groups and to introduce thiol groups into proteins, are known to those of skill in this art (see, e.g., the PIERCE CATALOG, ImmunoTechnology Catalog & Handbook, 1992-1993, which describes the preparation of and use of such reagents and provides a commercial source for such reagents; see, also, e.g., Cumber et al. (1992) Bioconjugate Chem. 3:397-401; Thorpe et al. (1987) Cancer Res. 47:5924-5931; Gordon et al. (1987) Proc. Natl. Acad. Sci. 84:308-312; Walden et al. (1986) J. Mol. Cell. Immunol. 2:191-197; Carlsson et al. (1978) Biochem. J. 173: 723-737; Mahan et al. 91987) Anal. Biochem. 162:163-170; Wawryznaczak et al. (1992) Br. J. Cancer 66:361-366; Fattom et al. (1992) Infection & Immun. 60:584-589). These reagents may be used to form covalent bonds between the N-terminal portion and C-terminus intron-encoded portion or between each of those portions and a linker. These reagents include, but are not limited to: N-succinimidyl-3-(2-pyridyldithio)propionate (SPDP; disulfide linker); sulfosuccinimidyl 6-[3-(2-pyridyldithio)propion [symbol] amido]hexanoate (sulfo-LC-SPDP); succinimidyloxycarbonyl-α-methyl benzyl thiosulfate (SMBT, hindered disulfate linker); succinimidyl 6-[3-(2-pyridyldithio)propionami [symbol] do] [symbol] hexanoate (LC-SPDP); sulfosuccinimidyl 4-(N-maleimidomethyl)cyclohexane-1-carboxylate (sulfo-SMCC); succinimi [symbol] dyl 3-(2-pyridyldithio)butyrate (SPDB; hindered disulfide bond linker); sulfosuccinimidyl 2-(7-azido-4-methylcoumarin-3-acetamide)ethyl-1,3′-dithiopropionate (SAED); sulfosuccinimidyl 7-azido-4-methylcoumarin-3-acetate (SAMCA); sulfosuccinimidyl-6-[alpha-methyl-alpha-(2-pyridyldithio)toluamido]-hexanoate (sulfo-LC-SMPT); 1,4-di-[3′-(2′-pyridyldithio)propion-amido]butane (DPDPB); 4-succinimidyloxycarbonyl-α-methyl-α-(2-pyridylthio)toluene (SMPT, hindered disulfate linker); sulfosuccinimidyl-6-[α-methyl-α-(2-pyrimiyldi-thio)toluamido]hexanoate (sulfo-LC-SMPT); m-maleimidobenzoyl-N-hydroxy-succinimide ester (MBS); m-maleimidobenzoyl-N-hydroxysulfo-succinimide ester (sulfo-MBS); N-succinimidyl(4-iodoacetyl)aminobenzoate (SIAB; thioether linker); sulfosuccinimidyl-(4-iodoacetyl)amino benzoate (sulfo-SIAB); succinimidyl-4-(p-maleimi-dophenyl)butyrate (SMPB); sulfosuccinimidyl-4-(p-maleimido-phenyl)buty-rate (sulfo-SMPB); azidobenzoyl hydrazide (ABH). These linkers, for example, can be used in combination with peptide linkers, such as those that increase flexibility or solubility or that provide for or eliminate steric hindrance. Any other linkers known to those of skill in the art for linking a polypeptide molecule to another molecule can be employed. General properties are such that the resulting molecule is biocompatible (for administration to animals, including humans) and such that the resulting molecule modulates the activity of a cell surface molecule, such as a RAGE receptor, or other cell surface molecule or receptor.

[0348] Pharmaceutical compositions can be prepared that contain RAGE isoform conjugates and treatment effected by administering a therapeutically effective amount of a conjugate, for example, in a physiologically acceptable excipient. RAGE isoform conjugates also can be used in in vivo therapy methods such as by delivering a vector containing a nucleic acid encoding a RAGE isoform conjugate as a fusion protein.

[0349] 1. Isoform Fusions

[0350] Exemplary of RAGE conjugates are RAGE isoform fusions, which include linkage of a nucleic acid sequence of RAGE with another nucleic acid sequence. Nucleic acid molecules that can be joined to a RAGE isoform, include but are not limited to, promoter sequences designed to facilitate intracellular protein expression, secretion sequences designed to facilitate protein secretion, regulatory sequences for regulating transcription and translation, molecules that regulate the serum stability of an encoded polypeptide such as portions of CD45 or an Fc portion of an immunoglobulin, and other polypeptide-encoding nucleic acid molecules such as those encoding a targeted agent or targeting agent, or those encoding all or part of another ligand or cell surface receptor intron fusion protein. The fusion sequence can be a component of an expression vector, or it can be part of an isoform nucleic acid sequence that is inserted into an expression vector. The fusion can result in a chimeric protein encoded by two or more genes, or the fusion can result in a protein sequence encoding only an RAGE isoform polypeptide, such as if the fused sequence is a signal sequence that is cleaved off following secretion of the polypeptide into the secretory pathway. In one example, a nucleic acid fused to all or part of a RAGE isoform can include any nucleic acid sequence that improves the production of an isoform such as a promoter sequence, epitope or fusion tag, or a secretion signal. In another example, a RAGE isoform fusion can include fusion with a targeted agent or targeting agent to produce a RAGE isoform conjugate such as described below. Additionally, a nucleic acid encoding all or part of a RAGE isoform can be joined to a nucleic acid encoding another ligand or cell surface receptor intron fusion isoform, or intron portion thereof, thereby generating a chimeric intron fusion protein. Exemplary RAGE chimeras are described below.

[0351] Encoded RAGE isoform fusion proteins can contain additional amino acids which do not adversely affect the activity of a purified isoform protein. For example, additional amino acids can be included in the fusion protein as a linker sequence which separate the encoded isoform protein from the encoded fusion sequence in order to provide, for example, a favored steric configuration in the fusion protein. The number of such additional amino acids which can serve as separators can vary, and generally do not exceed 60 amino acids. In another example, a fusion protein can contain amino acid residues encoded by a restriction enzyme linker sequence. In an additional example, an isoform fusion protein can contain selective cleavage sites at the junction or junctions between the fusion of a RAGE isoform with another molecule. For example, such selective cleavage sites may comprise one or more amino acid residues which provide a site susceptible to selective enzymatic, proteolytic, chemical, or other cleavage. In one example, the additional amino acids can be a recognition site for cleavage by a site-specific protease. The fusion protein can be further processed to cleave the fused polypeptide therefrom; for example, if the isoform protein is fused to an epitope tag but is required without additional amino acids such as for therapeutic purposes.

[0352] a. RAGE Isoform Fusions for Improved Production of RAGE Isoform Polypeptides

[0353] Provided herein are nucleic acid sequences encoding RAGE fusion polypeptides for the improved production of a RAGE isoform. A nucleic acid of a RAGE isoform, such as set forth in any one of SEQ ID NOS: 5-9 can be fused to a homologous or heterologous precursor sequence that substitutes for and/or provides for a functional secretory sequence. In one example, an isoform, such as an intron fusion protein isoform, containing a native endogenous precursor signal sequence of a cognate RAGE can have its precursor sequence replaced with a heterologous or homologous precursor sequence, such as a precursor sequence of tissue plasminogen activator or any other signal sequence known to one of skill in the art, to improve the secretion and production of a RAGE isoform polypeptide. The precursor sequence is most effectively utilized by locating it at the N-terminus of a recombinant protein to be secreted from the host cell. A nucleic acid precursor sequence can be operatively joined to a nucleic acid containing the coding region of a RAGE isoform in such a manner that the precursor sequence coding region is upstream of (that is, 5′ of) and in the same reading frame with the isoform coding region to provide an isoform fusion. The isoform fusion can be expressed in a host cell to provide a fusion polypeptide comprising the precursor sequence joined, at its carboxy terminus, to a RAGE isoform at its amino terminus. The fusion polypeptide can be secreted from a host cell. Typically, a precursor sequence is cleaved from the fusion polypeptide during the secretion process, resulting in the accumulation of a secreted isoform in the external cellular environment or, in some cases, in the periplasmic space.

[0354] Optionally a RAGE isoform, including an intron fusion protein, fusion nucleic acid also can include operative linkage with another nucleic acid sequence or sequences, such as a sequence that encodes a fusion tag, that promotes the purification and/or detection of an isoform polypeptide. Non-limiting examples of fusion tags include a myc tag, Poly-His tag, GST tag, Flag tag, fluorescent or luminescent moiety such as GFP or luciferase, or any other epitope or fusion tag known to one of skill in the art. In other embodiments, a nucleic acid sequence of a RAGE isoform can contain an endogenous signal sequence and can include fusion with a nucleic acid sequence encoding a fusion tag or tags. Many precursor sequences, including signal sequences and prosequences, and/or fusion tag sequences have been identified and are known in the art, and are contemplated to be used in conjunction with an isoform nucleic acid molecule. A precursor sequence may be homologous or heterologous to an isoform gene or cDNA, or a precursor sequence can be chemically synthesized. In most cases, the secretion of an isoform polypeptide from a host cell via the presence of a signal peptide and/or propeptide will result in the removal of the signal peptide or propeptide from the secreted intron fusion protein polypeptide.

[0355] i. Tissue Plasminogen Activator

[0356] Tissue plasminogen activator (tPA) is a serine protease that regulates hemostasis by converting the zymogen plasminogen to its active form, plasmin. Like other serine proteases, tPA is synthesized and secreted as an inactive zymogen that is activated by proteolytic processing. Specifically, the mature partially active single chain zymogen form of tPA can be further processed into a two-chain fully active form by cleavage after Arg-310 of SEQ ID NO:329 catalyzed by plasmin, tissue kallikrein or factor Xa. tPA is secreted into the blood by endothelial cells in areas immediately surrounding blood clots, which are areas rich in fibrin. tPA regulates fibrinolysis due to its high catalytic activity for the conversion of plasminogen to plasmin, a regulator of fibrin clots. Plasmin also is a serine protease that becomes converted into a catalytically active, two-chain form upon cleavage of its zymogen form by tPA. Plasmin functions to degrade the fibrin network of blood clots by cutting the fibrin mesh at various places, leading to the production of circulating fragments that are cleared by other proteinases or by the kidney and liver.

[0357] The precursor polypeptide of tPA includes a pre-sequence and pro-sequence encoded by residues 1-35 of a full-length tPA sequence set forth in SEQ ID NO:329 and exemplified in SEQ ID NO:327. The precursor sequence of tPA contains a signal sequence including amino acids 1-23 and also contains two pro-sequences including amino acids 24-32 and 33-35 of an exemplary tPA sequences set forth in SEQ ID NO: 327 or 329. The signal sequence of tPA is cleaved co-translationally in the ER and a pro-sequence is removed in the Golgi apparatus by cleavage at a furin processing site following the sequence RFRR occurring at amino acids 29-32 of the exemplary sequences set forth in SEQ ID NO:327 or 329. Furin cleavage of a tPA pro-sequence retains a three amino acid pro-sequence and exopeptidase cleavage site GAR, set forth as amino acids 33-35 of an exemplary tPA sequence set forth in SEQ ID NO: 327 or 329, within a mature polypeptide tPA sequence. The cleavage of the retained pro-sequence site is mediated by a plasmin-like extracellular protease to obtain a mature tPA polypeptide beginning at Ser36 set forth in SEQ ID NO:327 or 329. Inclusion of a protease inhibitor, such as for example aprotinin, in the culture medium can prevent exopeptidases cleavage and thereby retain a GAR pro-sequence in the mature polypeptide of tPA (Berg et al., (1991) Biochem Biophys Res Comm, 179:1289).

[0358] Typically, tPA is secreted by the constitutive secretory pathway, although in some cells tPA is secreted in a regulated manner. For example, in endothelial cells regulated secretion of tPA is induced following endothelial cell activation, for example, by histamine, platelet-activating factor or purine nucleotides, and requires intraendothelial Ca2+ and cAMP signaling (Knop et al., (2002) Biochem Biophys Acta 1600:162). In other cells, such as for example neural cells, specific stimuli that can induce secretion of tPA include exercise, mental stress, electroconvulsive therapy, and surgery (Parmer et al., (1997) J Biol Chem 272:1976). The mechanism mediating the regulated secretion of tPA requires signals on the tPA polypeptide itself, whereas the signal sequence of tPA efficiently mediates constitutive secretion of tPA since a GFP molecule operatively linked only to the signal sequence of tPA is constitutively secreted in the absence of carbachol stimulation (Lochner et al., (1998) Mol Biol Cell, 9:2463). In the absence of a tPA signal sequence, a tPA/GFP hybrid protein is not secreted from cells.

[0359] An exemplary tPA precursor sequence including a pre/propeptide sequence of tPA is set forth in SEQ ID NO: 327, and is encoded by a nucleic acid sequence set forth in SEQ ID NO:326. The signal sequence of tPA includes amino acids 1-23 of SEQ ID NO:329 and the pro-sequence includes amino acids 24-35 of SEQ ID NO:329 whereby a furin-cleaved pro-sequence includes amino acids 24-32 and a plasmin-like exoprotease-cleaved pro-sequence includes amino acids 33-35. Allelic variants of a tPA pre/prosequence are also provided herein, such as those set forth in SEQ ID NOS:330 or 331. Further, isoform protein fusion of a pre/prosequence of mammalian and non-mammalian origin of tPA are contemplated and exemplary sequences are set forth in SEQ ID NOS:332-339.

[0360] ii. tPA-RAGE Isoform Fusions

[0361] Provided herein are nucleic acid sequences encoding tPA-RAGE isoform polypeptides, for the improved production of a RAGE intron fusion protein isoform. Such nucleic acid sequences contain all or part of a pre/prosequence of tPA and optionally a c-myc fusion tag for the improved production of a RAGE intron fusion protein polypeptide. Nucleic acid sequences encoding RAGE isoforms, including intron fusion protein isoforms of RAGE, or allelic variants thereof, such as any one of SEQ ID NOS: 5-9, encoding amino acids set forth in SEQ ID NOS:10-14, operatively linked to a tPA pre/prosequence are provided. A tPA pre/prosequence can include a tPA pre/prosequence set forth as SEQ ID NO:326 encoding amino acids set forth as 1-35 in SEQ ID NO:327. In some examples, a tPA pre/pro sequence can replace the endogenous precursor signal sequence of RAGE, such as for example amino acids corresponding to amino acids 1-22 of a cognate RAGE set forth in SEQ ID NO:2, and/or provide for an optimal precursor sequence for the secretion of an intron fusion protein polypeptide.

[0362] In other embodiments, a RAGE isoform or allelic variants thereof, set forth in any one of SEQ ID NOS: 5-9, encoding amino acids set forth in SEQ ID NOS:10-14, can be operatively linked to part of a tPA pre/prosequence including the nucleic acid sequence up to the furin cleavage site of a pre/prosequence of tPA (encoded amino acids 1-32 of an exemplary tPA pre-prosequence set forth in SEQ ID NO:326), thereby excluding nucleic acids encoding amino acids GAR (encoded amino acids 33-35 of an exemplary tPA pre-prosequence set forth in SEQ ID NO:327). Additionally, a nucleic acid sequence of a RAGE isoform or allelic variants thereof, such as set forth in any one of SEQ ID NOS: 5-9, encoding amino acids set forth in SEQ ID NOS:10-14, can include operative linkage with allelic variants of all or part of a tPA pre/prosequence, such as set forth in SEQ ID NOS: 330 or 331 or can include operative linkage with all or part of other tPA pre/prosequences of mammalian and non-mammalian origin, such as set forth in any one of SEQ ID NOS:332-339. RAGE intron fusion protein-tPA pre/pro fusion sequences provided herein can exhibit enhanced cellular expression and secretion of a RAGE isoform polypeptide for improved production.

[0363] In another embodiment, a nucleic acid sequence encoding a RAGE isoform or allelic variant thereof, such as any one of SEQ ID NOS: 5-9, encoding amino acids set forth in SEQ ID NOS:10-14, can include operative linkage with a presequence (signal sequence) only of a tPA pre/prosequence such as an exemplary signal sequence encoding amino acids 1-23 of an exemplary tPA pre/prosequence set forth as SEQ ID NO:327. RAGE intron fusion protein-tPA presequence fusions provided herein can exhibit enhanced cellular expression and secretion of a RAGE isoform polypeptide for improved production.

[0364] In an additional embodiment, a nucleic acid sequence encoding a RAGE isoform or allelic variant thereof, such as any one of SEQ ID NOS: 5-9, encoding amino acids set forth in SEQ ID NOS:10-14, that contains an endogenous signal sequence of a cognate RAGE can include a fusion with a tPA prosequence where insertion of a tPA prosequence is between the RAGE isoform endogenous signal sequence and the RAGE isoform coding sequence. In one example, a tPA prosequence includes a nucleic acid sequence encoding amino acids 24-32 of an exemplary tPA pre/prosequence set forth as SEQ ID NO:326. In another example, a tPA pro-sequence includes a nucleic acid sequence encoding amino acids 33-35 of an exemplary tPA pre/prosequence set forth as SEQ ID NO:326. In an additional example, a tPA prosequence includes a nucleic acid sequence encoding amino acids 24-35 of an exemplary tPA pre/prosequence set forth as SEQ ID NO:326. Other tPA prosequences can include amino acids 24-32, 33-35, or 24-35 of allelic variants of tPA pre/prosequences such as set forth in SEQ ID NOS:330 or 331. RAGE intron fusion protein-tPA prosequence fusions provided herein can exhibit enhanced cellular expression and secretion of a RAGE isoform polypeptide for improved production.

[0365] Additionally, a RAGE isoform, RAGE intron fusion protein-tPA pre/prosequence fusion, RAGE intron fusion protein-tPA presequence fusion, and/or a RAGE intron fusion protein-tPA prosequence fusion for the improved secretion of an intron fusion protein polypeptide can optionally also include one, two, three, or more fusion tags that facilitate the purification and/or detection of a RAGE isoform polypeptide. Generally, a coding sequence for a specific tag can be spliced in frame on the amino or carboxy ends, with or without a linker region, with a coding sequence of a nucleic acid molecule encoding a RAGE isoform polypeptide. When fusion is on an amino terminus of a sequence, a fusion tag can be placed between an endogenous or heterologous precursor sequence. In one embodiment a fusion tag, such as a c-myc tag, 8×His tag, or any other fusion tag known to one of skill in the art, can be placed between a RAGE isoform endogenous signal sequence and a RAGE coding sequence. In another embodiment, a fusion tag can be placed between a heterologous precursor sequence, such as a tPA pre/prosequence, presequence, or prosequence set forth in SEQ ID NO:326, and a RAGE isoform coding sequence. In other embodiments, a fusion tag can be placed directly on the carboxy terminus of a nucleic acid encoding a RAGE isoform fusion polypeptide sequence. In some instances, a RAGE isoform fusion can contain a linker between an endogenous or heterologous precursor sequence and a fusion tag. RAGE isoform fusions containing one or more fusion tag(s) provided herein, including RAGE intron fusion protein-tPA fusions, can facilitate easier detection and/or purification of a RAGE isoform polypeptide for improved production.

[0366] For example, for the exemplary RAGE isoform provided herein as SEQ ID NO: 13 amino acids 1-23 of the RAGE isoform, including the endogenous signal sequence containing amino acids 1-22, can be replaced by a tPA pre/prosequence, such as for example, the exemplary tPA pre/prosequence set forth as SEQ ID NO: 327 and encoded by a tPA pre/prosequence set forth as SEQ ID NO:326. For example, the nucleic acid sequence of an exemplary tPA-RAGE intron fusion protein fusion set forth in SEQ ID NO:340, encoding a polypeptide set forth in SEQ ID NO: 341, can include the nucleic acid sequence encoding amino acids 23-266 of the RAGE isoform set forth in SEQ ID NO: 13 operatively linked at the 5′ end to a sequence containing a tPA pre/prosequence (nucleotides 1-105 of SEQ ID NO:340) followed by a sequence containing an XhoI restriction enzyme linker site (nucleotides 136-141 of SEQ ID NO:340). Optionally, a sequence of an exemplary tPA-RAGE intron fusion protein fusion set forth in SEQ ID NO:340, encoding a polypeptide set forth in SEQ ID NO:341, also can include a myc epitope tag set forth as nucleotides 106-135 operatively fused between the tPA pre/prosequence and the Xho I linker site.

[0367] b. Chimeric and Synthetic RAGE Isoform Polypeptides Including Homo- and Heteromultimeric Polypeptides

[0368] Also provided are chimeric RAGE isoform polypeptides. A chimeric RAGE isoform is a protein encoded by all or part of two or more genes resulting in a polypeptide containing all or part of an encoded RAGE sequence operatively linked to another polypeptide. Generally, such chimeric polypeptides are oligomeric (multimeric) molecules. Generally, the oligomers are dimers or trimers. Dimeric and trimeric forms of RAGE isoforms can exhibit enhanced activity compared to the monomeric form and/or can exhibit one or more additional activities as compared to a RAGE isoform. In some instances multimers are formed between the same RAGE isoform, different RAGE isoforms, or a RAGE isoform and another polypeptide isoform. Generally such isoforms are soluble forms of a cognate receptor or ligand and thereby lack a transmembrane domain. In most instances, such isoforms contain all or a sufficient portion of the extracellular domain such that they retain their ability to bind to ligand. In some examples, the isoforms are intron fusion proteins. Separate encoded polypeptide chains can be joined by multimerization, such as for example, by interchain disulfide bonds formed between cysteine residues to form oligomers. Alternatively, the multimers can be expressed as fusion proteins, with or without a spacer amino acids between a RAGE isoform and another isoform moiety, using recombinant DNA techniques. In some examples, two, three, or more encoded isoform polypeptides, including a RAGE isoform polypeptide, can be joined via a polypeptide linker.

[0369] Generally, such heteromultimeric polypeptides will retain the ability to bind their respective ligand. For example, a heteromultimeric polypeptide including a RAGE isoform retains its ability to bind AGEs, for example, and its ability to bind a ligand of the partner multimeric polypeptide. Consequently, such heteromultimeric polypeptides can serve as antagonist to one or more than one cognate receptor.

[0370] In one example, a chimeric RAGE isoform contains all or part of a RAGE isoform, including an intron from a RAGE intron fusion polypeptide, operatively linked at the N-terminus to another polypeptide or other molecule such that the resulting molecule modulates the activity of a cell surface molecule, particularly a RAGE receptor or RTK receptor, including any involved in pathways that participate in the inflammatory response, angiogenesis, neovascularization and/or cell proliferation. Included among these synthetic “polypeptides” are chimeric intron fusion polypeptides in which all or part of a RAGE isoform is linked to all or part of an intron fusion protein, such as for example any one of the sequences of intron fusion proteins disclosed in U.S. patent application Ser. No. 10/846,113 or 11/129,740, incorporated by reference in their entirety, or set forth in any of the sequences and encoded amino acids set forth in any one of SEQ ID NOS: 28, 30, 32-50, 52, 54, 56, 58, 60, 62, 64, 66, 68, 70, 72, 74, 76, 78, 80, 82, 84, 86, 88, 90, 92, 105, 107, 109, 111, 113, 115, 17, 119, 121, 123, 125, 127, 129, 131, 133, 135, 137, 139, 141, 143, 145, 147, 149, 151, 153, 155, 157, 159, 161, 163, 306-318, and 344-348. For example, a chimeric RAGE includes a polypeptide in which all or part of the N-terminus from the extracellular domain of a RAGE isoform is linked to the intron of an intron fusion protein, such as intron 8 of a herstatin (see, e.g., SEQ ID Nos. 278-291, and encoded amino acids set forth in SEQ ID NOS: 253, 266-277, 342). Exemplary herstatins, or intron 8 portions thereof, are set forth in SEQ ID NOS: 252-291, 342, and 343). Table 4 below identifies the variations in the intron 8-encoded portion of a herstatin compared to a prominent intron 8 (SEQ ID NO:253), included at amino acids 341-419 of the prominent herstatin molecule set forth as SEQ ID NO:252. The sequence identifiers (SEQ ID NOS) for exemplary intron 8 and herstatin molecules, including variants of an intron 8 or herstatin, are in parentheses. Other herstatin variants include allelic variants, particularly those with variation in the extracellular domain portion.

TABLE 4
Herstatin Variants

| Intron 8 Variant | | Herstatin variant |
|---|---|---|
| Nucleotide | Amino Acid | Amino Acid |
| Prominent (278) | Prominent (253) | Prominent (252) |
| nt 4 = T (279) | aa 2 = Thr or Ser (266) | aa 342 = Thr or Ser (254) |
| nt 14 = C (280) | aa 5 = Leu or Pro (267) | aa 345 = Leu or Pro (255) |
| nt 17 = T (281) | aa 6 = Pro or Leu (268) | aa 346 = Pro or Leu (256) |
| nt 47 = A (282) | aa 16 = Leu or Gln (269) | aa 356 = Leu or Gln (257) |
| nt 52 = C (283) | aa 18 = Met or Leu (270) | aa 358 = Met or Leu (258) |
| nt 62 = C, T, A | aa 21 = Gly, Asp, Ala, | aa 361 = Gly, Asp, Ala, |
| (284) | Val (271) | Val (259) |
| nt 92 = T (291) | aa 31 = Arg or Ile (277) | aa 371 = Arg or Ile (265) |
| nt 106 = A (285) | aa 36 = Leu or Ile (272) | aa 376 = Leu or Ile (260) |
| nt 161 = G (286) | aa 54 = Pro or Arg (273) | aa 394 = Pro or Arg (261) |
| nt 191 = T (287) | aa 64 = Pro or Leu (274) | aa 404 = Pro or Leu (262) |
| nt 217 = C or A | aa 73 = Asp, His, or Asn | aa 413 = Asp, His or Asn |
| (288) | (275) | (263) |
| nt 49 = T (290) | aa 17 = Arg or Cys (276) | aa 357 = Arg or Cys (264) |
| nt 17 = T and nt | aa 6 = Leu and aa 73 = | aa 346 = Leu and aa 413 = |
| 217 = C or A | His or Asn (342) | His or Asn (343) |
| (289) | | |

[0371] Chimeric and synthetic RAGE isoform fusions also include fusion of nucleic acid encoding a RAGE isoform provided herein, with a nucleic acid encoding another RAGE isoform provided herein or known to skill in the art. For example, RAGE isoforms provided herein can be linked directly or indirectly to all or part of a RAGE isoform, such as for example, a RAGE isoform sequence encoding amino acids set forth in any one of SEQ ID NOS: 292-305.

[0372] The N- or C-terminus portion of a RAGE isoform can be linked directly to the N- or C-terminus (intron-encoded portion) of the synthetic intron fusion protein or to another polypeptide, or can be linked via a linker, such as a polypeptide linker. Linkage can be effected by recombinant expression of a fusion protein where there is no linker or where the linker is a polypeptide. For example, linkage can be effected by recombinant expression of a fusion protein where all or part of a nucleic acid encoding a RAGE isoform is operatively linked at the 5′ end to all or part of a nucleic acid encoding another intron fusion protein. Linkage can be in the presence of an encoded peptide linker such as any linker described herein or known in the art, or in the presence of a restriction enzyme linker.

[0373] In some instances, chemical synthesis also can be employed. For example, when the linker is not a polypeptide, linkage can be effected chemically. In such instances, a RAGE isoform encoded polypeptide also can be linked or conjugated to all or part of another polypeptide by chemical linkage such as by using a heterobifunctional cross-linking reagent or any other linkage that can be effected chemically such as is described above.

[0374] Any suitable linker can be selected so long as the resulting molecule interacts with a CSR and modulates, typically inhibits, its activity. Linkers can be selected to add a desirable property, such as to increase serum stability, solubility and/or intracellular concentration and to reduce steric hindrance caused by close proximity where one or more linkers is (are) inserted between the N-terminal portion and intron-encoded portion. The resulting molecule is designed or selected to retain the ability to modulate the activity of a CSR, particularly RTKs, including any involved in pathways that are involved in inflammatory responses, neovascularization, angiogenesis and cell proliferation.

[0375] Linkers include chemical linkers and peptide linkers, such as peptides that increase flexibility or solubility of the linked moieties. For example linkers can be inserted using heterobifunctional reagents, such as those described above, or, can be linked by linking DNA encoding polypeptide linker to the DNA encoding the N-terminal (and/or C-terminal portion) and expressing the resulting chimera. In addition, where no linker is present the N-terminus can be linked directly to the intron encoded portion. In some embodiments, the N-terminus portion can be replaced by a non-peptidic moiety that provides sufficient steric hindrance and bulk to permit the intron-encoded portion to interact with and modulate the activity of a receptor. As noted above, the N-terminus also can be selected to target the intron-encoded portion to selected CSRs or a selected CSR.

[0376] In some instances, heterodimers can be prepared by expression of chimeric molecules utilizing flexible linker loops. For example, a DNA construct encoding a chimeric protein is designed such that it expresses two isoforms, such as for example a RAGE isoform and another isoform polypeptide, fused together in tandem (“head to head”) by a flexible loop. This loop can be entirely artificial (e.g., polyglycine repeats interrupted by serine or threonine at certain intervals), or “borrowed” from naturally occurring proteins (e.g., the hinge region of hIgG). Molecules can be engineered in which the order of the isoforms fused is switched (e.g., RAGE isoform/loop/X isoform or X isoform/loop/RAGE isoform, where X is another polypeptide isoform that can be the same or different from the RAGE isoform). In addition, molecules can be engineered in which the length and composition of the loop is varied, to allow for selection of molecules with desired characteristics.

[0377] Also provided are homo- or heteromultimeric RAGE isoform polypeptides generated from separate chimeric fusion polypeptides. Such polypeptides include chimeric fusions, such as for example, fusion (directly or indirectly) of a nucleic acid encoding a RAGE isoform with a nucleic acid encoding a multimerization domain and a second polypeptide chimeric fusion of a nucleic acid encoding the same or different polypeptide isoform with a nucleic acid encoding a multimerization domain. Typically, the multimerization domain provides for the formation of a stable protein-protein interaction between a first polypeptide chimeric fusion and a second polypeptide chimeric fusion. The first and second chimeric fusion can be the same or different. A heteromultimer isoform fusion polypeptide includes two or more chimeric isoform polypeptides, or an active portion thereof, including a RAGE isoform such as provided herein, and/or another polypeptide isoform. Generally, a homo- or heteromultimer provided herein contains as a multimerization partner at least one RAGE isoform, such as for example any provided herein and set forth in SEQ ID NOS: 5-9, encoding amino acids set forth in SEQ ID NO:10-14. For example, a homomultimeric RAGE isoform polypeptide can result from the multimerization of the same chimeric RAGE isoform fusion. In another example, a heteromultimeric RAGE isoform polypeptide can result from the multimerization of a chimeric RAGE isoform fusion with another chimeric fusion polypeptide. Generally, such other polypeptide fusion contains all or part of the extracellular domain (ECD) of a cell surface receptor (CSR), such as for example, a receptor tyrosine kinase (RTK). Exemplary polypeptides for the generation of heteromultimeric polypeptides with a RAGE isoform provided herein, include any CSR or ligand isoform such as for example any described in U.S. patent application Ser. No. 10/846,113 or 11/129,740, incorporated by reference in their entirety, or set forth in any of the sequences and encoded amino acids set forth in any one of SEQ ID NOS: 28, 30, 32-50, 52, 54, 56, 58, 60, 62, 64, 66, 68, 70, 72, 74, 76, 78, 80, 82, 84, 86, 88, 90, 92, 105, 107, 109, 111, 113, 115, 17, 119, 121, 123, 125, 127, 129, 131, 133, 135, 137, 139, 141, 143, 145, 147, 149, 151, 153, 155, 157, 159, 161, 163, 306-318, and 344-348. Other exemplary polypeptides include any RAGE isoform known in the art, such as for example, any having an encoded amino acid sequence set forth in any one of SEQ ID NOS: 292-305.

[0378] Generally, a multimerization domain includes any capable of forming a stable protein-protein interaction. The multimerization domains can interact via an immunoglobulin sequence, leucine zipper, a hydrophobic region, a hydrophilic region, or a free thiol which forms an intermolecular disulfide bond between the chimeric molecules of a homo- or heteromultimer. In addition, a multimerization domain can include an amino acid sequence comprising a protuberance complementary to an amino acid sequence comprising a hole, such as is described, for example, in U.S. patent application Ser. No. 08/399,106. Such a multimerization region can be engineered such that steric interactions not only promote stable interaction, but further promote the formation of heterodimers over homodimers from a mixture of chimeric monomers. Generally, protuberances are constructed by replacing small amino acid side chains from the interface of the first polypeptide with larger side chains (e.g., tyrosine or typtophan). Compensatory cavities of identical or similar size to the protuberances are optionally created on the interface of the second polypeptide by replacing large amino acid side chains with smaller ones (e.g., alanine or threonine). In addition, multimerization domains include those comprising a free thiol moiety capable of reacting to form an intermolecular disulfide bond with a multimerization domain of an additional amino acid sequence. For example, a multimerization domain can include a portion of an immunoglobulin molecule, such as from IgG1, IgG2, IgG3, IgG4, IgA, IgD, IgM, and IgE. Generally, such portion is an immunoglobulin constant region (Fc). In another example, a multimerization domain is a polyethylene glycol (PEG) moiety others.

[0379] In one example, a RAGE isoform, and/or other polypeptide isoform, is engineered using leucine zippers. The leucine zipper domains of the human transcription factors c-jun and c-fos have been shown to form stable heterodimers (see e.g., Busch and Sassone-Corsi (1990) Trends Genetics, 6: 36-40; Gentz et al., (1989) Science, 243: 1695-1699) with a 1:1 soichiometry. Although jun-jun homodimers also have been shown to form, they are about 1000-fold less stable than jun-fos heterodimers. Thus, typically heterodimers are generated using a jun-fos combination, for example heterodimers of a RAGE isoform dimerized to another polypeptide through leucine zipper interactions. Generally, the leucine zipper domain of either c-jun or c-fos are fused in frame at the C-terminus of the soluble or extracellular domains of polypeptide isoforms, such as RAGE isoforms, by genetically engineering chimeric genes. Exemplary encoded amino acid sequences of a c-jun and c-fos leucine zipper are set forth in SEQ ID NOS: 364 and 365, respectively. In some instances, sequence of a leucine zipper can be modified, such as by the addition of a cysteine residue to allow formation of disulfide bonds, or the addition of a tyrosine residue at the C-terminus to facilitate measurement of peptide concentration. Exemplary sequences of encoded amino acid sequences of a modified c-jun and c-fos leucine zipper are set forth in SEQ ID NOS: 366 and 367, respectively. In addition, the fusions can be direct or can employ a flexible linker domain, such as for example a hinge region of IgG, or polypeptide linkers of small amino acids such as glycine, serine, threonine, or alanine at various lengths and combinations. In some instances, separation of a leucine zipper from the C-terminus of an encoded polypeptide isoform can be effected by fusion with a sequence encoding a protease cleavage site, such as for example, a thrombin cleavage site. Additionally, the chimeric proteins can be tagged, such as for example, by a 6×His tag, to allow rapid purification by metal chelate chromatography and/or by epitopes to which antibodies are available, such as for example a myc tag, to allow for detection on western blots, immunoprecipitation, or activity depletion/blocking bioassays.

[0380] In another example, an Fc-domain can be employed as a multimerization domain. For example, the Fc domain of human IgG1 can be used (see e.g., Aruffo et al., (1991) Cell, 67:35-44). In this instance, formation of heterodimers must be biochemically achieved, as chimeric molecules carrying the Fc-domain will be expressed as disulfide-linked homodimers as well. Thus, homodimers can be reduced under conditions that favor the disruption of inter-chain disulfides, but do not effect intra-chain disulfides. Typically, chimeric monomers with different extracellular portions are mixed in equimolar amounts and oxidized to form a mixture of homo- and heterodimers. The components of this mixture are separated by chromatographic techniques. Alternatively, the formation of this type of heterodimers can be biased by genetically engineering and expressing chimeric molecules that contain isoforms, such as a RAGE isoform and another isoform, followed by the Fc-domain of hIgG, followed by either c-jun or the c-fos leucine zippers. Since these leucine zippers form predominantly heterodimers, they can be used to drive the formation of the heterodimers when desired. Chimeric proteins containing Fc regions can be engineered to include a tag with metal chelates or other epitope. The tagged domain can be used for rapid purification by metal-chelate chromatography, and/or by antibodies, to allow for detection of western blots, immunoprecipitation, or activity depletion/blocking in bioassays.

[0381] In additional examples, heterodimers can be prepared using immunoglobulin derived domains that drive the formation of dimers. Such domains include, for example, the heavy chains of IgG (Cγ1 and Cγ4), as well as the constant regions of kappa (κ) and lambda (λ) light chains of immunoglobulins. The heterodimerization of Cγ with the light chain occurs between the CH1 domain of Cγ and the constant region of the light chain (C_{L}), and is stabilized by covalent linking of the two domains via a single disulfide bridge. Alternatively, the immunoglobulin domains can include domains that are derived from T cell receptor components which drive dimerization.

[0382] Preparation of chimeric fusion proteins containing heterologous polypeptides fused to various portions of antibody-derived polypeptides (including the Fc domain) has been described (see e.g., Ashkenazi et al., (1991) PNAS 88:10535); Byrn et al., (1990) Nature 344:677). An Fc polypeptide can be a native or mutein form, as well as a truncated Fc polypeptides containing the hinge region that promotes dimerization. An exemplary Fc portion is derived from hIgG1. In some examples, the linker length of the hinge region can vary. Examples of amino acid sequences of an Fc include, but are not limited to, those set forth in SEQ ID NO: 361 and 362. An exemplary mutein Fc is set forth in SEQ ID NO:363. Such a mutein Fc is identical to the amino acid sequence set forth in SEQ ID NO:362, except amino acid 32 has been changed from Leu to Ala, amino acid 33 has been changed from Leu to Glu, and amino acid 35 has been changed from Gly to Ala. Such a mutein Fc exhibits reduced affinity for immunoglobulin receptors.

[0383] Heteromultimeric chimeric isoform fusions also can be generated utilizing protein-protein interactions between the regulatory (R) subunit of cAMP-dependent protein kinase (PKA) and the anchoring domains (AD) of A kinase anchor proteins (AKAPs, see e.g., Rossi et al., (2006) PNAS 103:6841-6846). Two types of R subunits (RI and RII) are found in PKA, each with an α and β isoform. The R subunits exist as dimers, and for RII, the dimerization domain resides in the 44 amino-terminal residues (see e.g., SEQ ID NO: 357). AKAPs, via the interaction of their AD domain, interact with the R subunit of PKA to regulate its activity. AKAPs bind only to dimeric R subunits. For example, for human RIIα, the AD binds to a hydrophobic surface formed from the 23 amino-terminal residues. An exemplary sequence of AD is AD1 set forth in SEQ ID NO:358, which is a 17 amino acid residue sequence derived from AKAP-IS, a synthetic peptide optimized for RII-selective binding. Thus, a heteromultimeric isoform polypeptide can be generated by linking (directly or indirectly) a nucleic acid encoding a polypeptide isoform, such as a RAGE isoform, with a nucleic acid encoding an R subunit sequence (i.e. SEQ ID NO:357). This results in a homodimeric molecule, due to the spontaneous formation of a dimer effected by the R subunit. In tandem, another chimeric polypeptide isoform can be generated by linking a nucleic acid encoding another polypeptide isoform to a nucleic acid sequence encoding an AD sequence. Upon co-expression of the two components, such as following co-transfection of the chimeric isoform fusion components in host cells, the dimeric R subunit provides a docking site for binding to the AD sequence, resulting in a heteromultimeric molecule. This binding event can be further stabilized by covalent linkages, such as for example, disulfide bonds. In some examples, a flexible linker residue can be fused between the nucleic acid encoding the polypeptide isoform and the multimerization domain. In another example, fusion of a nucleic acid encoding a polypeptide isoform can be to a nucleic acid encoding an R subunit containing a cysteine residue incorporated adjacent to the amino-terminal end of the R subunit to facilitate covalent linkage (see e.g., SEQ ID NO:359). Similarly, fusion of a nucleic acid encoding a partner polypeptide isoform can be to a nucleic acid encoding an AD subunit also containing incorporation of cysteine residues to both the amino- and carboxyl-terminal ends of AD (see e.g., SEQ ID NO:360).

[0384] Other multimerization domains are known to those of skill in the art and are any that facilitate the protein-protein interaction of two or more polypeptides that are separately generated and expressed as chimeric fusions. Examples of other multimerization domains that can be used to provide protein-protein interactions between two chimeric polypeptides include, but are not limited to, the barnase-barstar module (see e.g., Deyev et al., (2003) Nat. Biotechnol. 21:1486-1492); selection of particular protein domains (see e.g., Terskikh et al., (1997) PNAS 94: 1663-1668 and Muller et al., (1998) FEBS Lett. 422:259-264); selection of particular peptide motifs (see e.g., de Kruif et al., (1996) J. Biol. Chem. 271:7630-7634 and Muller et al., (1998) FEBS Lett. 432: 45-49); and the use of disulfide bridges for enhanced stability (de Kruif et al., (1996) J. Biol. Chem. 271:7630-7634 and Schmiedl et al., (2000) Protein Eng. 13:725-734).

[0385] Chimeric fusion polypeptides can be generated by fusion of nucleic acid encoding the polypeptide isoform to a multimerization domain either directly or indirectly. For example, fusion of a chimeric fusion polypeptide to a multimerization domain can be through direct linkage. Such sequences can be constructed using recombinant DNA techniques. Alternatively, fusion of a chimeric isoform polypeptide to a multimerization domain can be through indirect linkage, such as by covalent linkage using, for example, heterobifunctional crosslinking agents such as is described above.

[0386] When preparing chimeric isoform polypeptides, nucleic acids encoding an isoform, or portion thereof, of a cognate ligand or receptor is fused C-terminally to nucleic acid encoding the N-terminus of a multimerization domain, such as for example, an immunogloculin constant domain sequence, however, N-terminal fusions are also possible. Typically, where fusion is to an immunoglobulin constant domain sequence (i.e. Fc), the encoded chimeric polypeptide retains at least a functionally active hinge, CH2 and CH3 domains of the constant region of an immunoglobulin heavy chain. Fusions also can be made to the C-terminus of the Fc portion of a constant domain, or immediately N-terminal to the CH1 of the heavy chain or the corresponding region of the light chain. The resultant DNA fusion construct is expressed in appropriate host cells.

[0387] Expression of RAGE isoform heterodimers can be facilitated by co-transfection of host cells with the appropriate isoform components (i.e. nucleic acids encoding a RAGE isoform chimeric polypeptide containing a multimerization domain and/or another isoform polypeptide containing a multimerization domain). Expression thereof of each of the respective chimeric fusion polypeptides, including a RAGE chimeric fusion polypeptide, results in interaction of the multimerization domains to form stable protein-protein interaction between a first polypeptide chimeric fusion and a second polypeptide chimeric fusion. RAGE isoform heterodimers can be purified from cell lines cotransfected with the appropriate isoform components If necessary, heterodimers can be separated from homodimers using methods available to those of skill in the art. For example, limited quantities of RAGE isoform heterodimers can be recovered by passive elution from preparative, nondenaturing polyacrylamide gels. Alternatively, heterodimers can be purified using high pressure cation exchange chromatography, for example, using a Mono S cation exchange column.

[0388] Additionally, a chimeric isoform polypeptide can contain a fusion of a nucleic acid encoding a monomer of the chimeric heterodimer with a nucleic acid encoding a tag polypeptide, which provides an epitope to which an anti-tag antibody can selectively bind. Such epitope tagged forms of the chimeric heterodimer facilitate the detection of the heterodimer using a labeled antibody against the tag polypeptide. Also, the presence of the epitope tag enables the chimeric heterodimer to be readily purified by affinity purification using an anti-tag antibody. Examples of tags, include but are not limited to, the flu HA tag polypeptide and its antibody 12CA5, the c-myc tag and the 8F9, 3C7, 6E10, G4, B7, and 9E10 antibodies thereto, and the Herpes Simplex virus glycoprotein D (gD) and its antibody.

[0389] Another type of covalent modification of a chimeric heteromultimer includes linking an isoform monomer polypeptide of the heteromultimer to one of a variety of nonproteinaceous polymers, e.g., polyethylene glycol, polypropylene glycol, polyoxyalkylenes, or copolymers of polyethylene glycol and polypropylene glycol. A chimeric heteromultimer also can be entrapped in microcapsules prepared, for example, by coacervation techniques or by interfacial polymerization (for example, hydroxymethylcellulose or gelatin-microcapsules and poly-(methylmethacylate) microcapsules, respectively), in colloidal drug delivery systems (for example, liposomes, albumin microspheres, microemulsion, nano-particles and nanocapsules), or in macroemulsions.

[0390] c. Methods of Generating and Cloning RAGE Fusions

[0391] The methods by which DNA sequences may be obtained and linked to provide the DNA sequence encoding the fusion protein are well known in the field of recombinant DNA technology. DNA for a sequence to be fused to a RAGE isoform, including, but not limited to a sequence of a RAGE isoform, a precursor signal sequence, a fusion tag, another isoform or intron-encoded portion thereof, or any other desired sequence can be generated by various methods including: synthesis using an oligonucleotide synthesizer; isolation from a target DNA such as from an organism, cell, or vector containing the sequence, by appropriate restriction enzyme digestion; or can be obtained from a target source by PCR of genomic DNA with the appropriate primers. In a PCR method, primers directed against a target sequence, such as a RAGE isoform sequence, can be engineered that contain sequences for small epitope tags, such as a myc tag, His tag, or other small epitope tag, and/or any other additional DNA sequence such as a restriction enzyme linker sequence or a protease cleavage site sequence such that the entire PCR sequence is incorporated into a target nucleic acid sequence upon PCR amplification. In an exemplary embodiment, the primer can introduce restriction enzyme sites into a RAGE isoform sequence, or other target sequence, to facilitate the cloning of the sequence into a vector.

[0392] In one example, RAGE isoform fusion sequences can be generated by successive rounds of ligating DNA target sequences, amplified by PCR, into a vector at engineered recombination site. For example, a nucleic acid sequence for a RAGE isoform, fusion tag, homologous or heterologous precursor sequence, or other desired nucleic acid sequence can be PCR amplified using primers that hybridize to opposite strands and flank the region of interest in a target DNA. Cells or tissues or other sources known to express a target DNA molecule, or a vector containing a sequence for a target DNA molecule, can be used as a starting product for PCR amplification events. The PCR amplified product can be subcloned into a vector for further recombinant manipulation of a sequence, such as to create a fusion with another nucleic acid sequence already contained within a vector, or for the expression of a target molecule.

[0393] PCR primers used in the PCR amplification also can be engineered to facilitate the operative linkage of nucleic acid sequences. For example, non-template complementary 5′ extension can be added to primers to allow for a variety of post-amplification manipulations of the PCR product without significant effect on the amplification itself. For example, these 5′ extensions can include restriction sites, promoter sequences, sequences for epitope tags, etc. In one example, for the purpose of creating a fusion sequence, sequences that can be incorporated into a primer include, for example, a sequence encoding a myc epitope tag or other small epitope tag, such that the amplified PCR product effectively contains a fusion of a nucleic acid sequence of interest with an epitope tag.

[0394] In another example, incorporation of restriction enzyme sites into a primer can facilitate subcloning of the amplification product into a vector that contains a compatible restriction site, such as by providing sticky ends for ligation of a nucleic acid sequence. Subcloning of multiple PCR amplified products into a single vector can be used as a strategy to operatively link or fuse different nucleic acid sequences. Examples of restriction enzyme sites that can be incorporated into a primer sequence can include, but are not limited to, an Xho I restriction site, an NheI restriction site, a Not I restriction site, an EcoRI restriction site, or an Xba I restriction site. Other methods for subcloning of PCR products into vectors include blunt end cloning, TA cloning, ligation independent cloning, and in vivo cloning.

[0395] The creation of an effective restriction enzyme site into a primer requires the digestion of the PCR fragment with a compatible restriction enzyme to expose sticky ends, or for some restriction enzyme sites, blunt ends, for subsequent subcloning. There are several factors to consider in engineering a restriction enzyme site into a primer so that it retains its compatibility for a restriction enzyme. First, the addition of 2-6 extra bases upstream of an engineered restriction site in a PCR primer can greatly increase the efficiency of digestion of the amplification product. Other methods that can be used to improve digestion of a restriction enzyme site by a restriction enzyme include proteinase K treatment to remove any thermostable polymerase that can block the DNA, end-polishing with Klenow or T4 DNA polymerase, and/or the addition of spermidine. An alternative method for improving digestion efficiency of PCR products also can include concatamerization of the fragments after amplification. This is achieved by first treating the cleaned up PCR product with T4 polynucleotide kinase (if the primers have not already been phosphorylated). The ends may already be blunt if a proofreading thermostable polymerase such as Pfu was used or the amplified PCR product can be treated with T4 DNA polymerase to polish the ends if a non-proofreading enzyme such as Taq is used. The PCR products can be ligated with T4 DNA ligase. This effectively moves the restriction enzyme site away from the end of the fragments and allows for efficient digestion.

[0396] Prior to subcloning of a PCR product containing exposed restriction enzyme sites into a vector, such as for creating a fusion with a sequence of interest, it is sometimes necessary to resolve a digested PCR product from those that remain uncut. In such examples, the addition of fluorescent tags at the 5′ end of a primer can be added prior to PCR. This allows for identification of digested products since those that have been digested successfully will have lost the fluorescent label upon digestion.

[0397] In some instances, the use of amplified PCR products containing restriction sites for subsequent subcloning into a vector for the generation of a fusion sequence can result in the incorporation of restriction enzyme linker sequences in the fusion protein product. Generally such linker sequences are short and do not impair the function of a polypeptide so long as the sequences are operatively linked.

[0398] The nucleic acid molecule encoding an isoform fusion protein can be provided in the form of a vector which comprises the nucleic acid molecule. One example of such a vector is a plasmid. Many expression vectors are available and known to those of skill in the art and can be used for expression of aCSR isoform, including isoform fusions. The choice of expression vector can be influenced by the choice of host expression system. In general, expression vectors can include transcriptional promoters and optionally enhancers, translational signals, and transcriptional and translational termination signals. Expression vectors that are used for stable transformation typically have a selectable marker which allows selection and maintenance of the transformed cells. In some cases, an origin of replication can be used to amplify the copy number of the vector.

[0399] 2. Targeting Agent/Targeting Agent Conjugates

[0400] RAGE isoforms also can be provided as conjugates between the isoform and another agent. The conjugate can be used to target to a receptor with which the isoform interacts and/or to another targeted receptor for delivery of isoform. Such conjugates include linkage of a RAGE isoform to a targeted agent and/or targeting agent. Conjugates can be produced by any suitable method including chemical conjugation or by expression of fusion proteins in which, for example, DNA encoding a targeted agent or targeting agent, with or without a linker region, is operatively linked to DNA encoding a RAGE isoform. Protein conjugates also can be produced by chemical coupling, typically through disulfide bonds between cysteine residues present in or added to the components, or through amide bonds or other suitable bonds. Ionic or other linkages also are contemplated.

[0401] Conjugates can contain one or more RAGE isoforms linked, either directly or via a linker, to one or more targeted agents: (RAGE isoform)n, (L)q, and (targeted agent)m in which at least one RAGE isoform is linked directly or via one or more linkers (L) to at least one targeted agent. Such conjugates also can be produced with any portion of a RAGE isoform sufficient to bind a target, such as a target cell type for treatment. Any suitable association among the elements of the conjugate and any number of elements where n, and m are integer greater than 1 and q is zero or any integer greater then 1, is contemplated as long as the resulting conjugates interacts with a targeted RAGE or targeted cell type.

[0402] Examples of a targeted agent include drugs and other cytotoxic molecules such as toxins that act at or via the cell surface and those that act intracellularly. Examples of such moieties, include radionuclides, radioactive atoms that decay to deliver, e.g., ionizing alpha particles or beta particles, or X-rays or gamma rays, that can be targeted when coupled to a RAGE isoform. Other examples include chemotherapeutics that can be targeted by coupling with an isoform. For example, geldanamycin targets proteosomes. An isoform-geldanamycin molecule can be directed to intracellular proteosomes, degrading the targeted isoform and liberating geldanamycin at the proteosome. Other toxic molecules include toxins, such as ricin, saporin and natural products from conches or other members of phylum mollusca. Another example of a conjugate with a targeted agent is a RAGE isoform coupled, for example as a protein fusion, with an antibody or antibody fragment. For example, an isoform can be coupled to an Fc fragment of an antibody that binds to a specific cell surface marker to induce killer T cell activity in neutrophils, natural killer cells, and macrophages. A variety of toxins are well known to those of skill in the art.

[0403] Conjugates can contain one or more RAGE isoforms linked, either directly or via a linker, to one or more targeting agents: (RAGE isoform)n, (L)q, and (targeting agent)m in which at least one RAGE isoform is linked directly or via one or more linkers (L) to at least one targeting agent. Any suitable association among the elements of the conjugate and any number of elements where n, and m are integer greater than 1 and q is zero or any integer greater then 1, is contemplated as long as the resulting conjugates interacts with a target, such as a targeted cell type.

[0404] Targeting agents include any molecule that targets a RAGE isoform to a target such as a particular tissue or cell type or organ. Examples of targeting agents include cell surface antigens, cell surface receptors, proteins, lipids and carbohydrate moieties on the cell surface or within the cell membrane, molecules processed on the cell surface, secreted and other extracellular molecules. Molecules useful as targeting agents include, but are not limited to, an organic compound; inorganic compound; metal complex; receptor; enzyme; antibody; protein; nucleic acid; peptide nucleic acid; DNA; RNA; polynucleotide; oligonucleotide; oligosaccharide; lipid; lipoprotein; amino acid; peptide; polypeptide; peptidomimetic; carbohydrate; cofactor; drug; prodrug; lectin; sugar; glycoprotein; biomolecule; macromolecule; biopolymer; polymer; and other such biological materials. Exemplary molecules useful as targeting agents include ligands for receptors, such as proteinaceous and small molecule ligands, and antibodies and binding proteins, such as antigen-binding proteins.

[0405] Alternatively, the RAGE isoform, which specifically interacts with a particular receptor (or receptors) is the targeting agent and it is linked to targeted agent, such as a toxin, drug or nucleic acid molecule. The nucleic acid molecule can be transcribed and/or translated in the targeted cell or it can be regulatory nucleic acid molecule.

[0406] The RAGE can be linked directly to the targeted (or targeting agent) or via a linker. Linkers include peptide and non-peptide linkers and can be selected for functionality, such as to relieve or decrease steric hindrance caused by proximity of a targeted agent or targeting agent to a RAGE isoform and/or increase or alter other properties of the conjugate, such as the specificity, toxicity, solubility, serum stability and/or intracellular availability and/or to increase the flexibility of the linkage between a RAGE isoform and a targeted agent or targeting agent. Examples of linkers and conjugation methods are known in the art (see, for example, WO 00/04926). RAGE isoforms also can be targeted using liposomes and other such moieties that direct delivery of encapsulated or entrapped molecules.

[0407] 3. Peptidomimetic Isoforms

[0408] Also provided are “peptidomimetic” isoforms in which one or more bonds in the peptide backbone (or other bond(s)) is (are) replaced by a bioisotere or other bond such that the resulting polypeptide peptidomimetic has improved properties, such as resistance to proteases, compared to the unmodified form.

H. Assays to Assess or Monitor RAGE Isoform Activities

[0409] Generally, the RAGE isoforms provided herein exhibit an alteration in structure and also one or more activities compared to a wildtype or predominant form of a receptor. All such isoforms are candidate therapeutics. If needed, identified isoforms can be screened using in vitro and in vivo assays to monitor or identify an activity of a RAGE isoforms and to select RAGE isoforms that exhibit such an activity or alteration in activity and/or that exhibit ligand binding or that modulate RAGE activity.

[0410] Any suitable assay can be employed, including assays exemplified herein. Numerous assays for biological activities of RAGE are known to one of skill in the art. The assays permit comparison of an activity of a RAGE isoform to an activity of a wildtype or predominant form of a RAGE receptor to identify isoforms that lack an activity. In addition, assays permit identification of isoforms that modulate the activity of a RAGE receptor. Assays for RAGE and RAGE isoforms include, but are not limited to, immunostaining and localization, ligand binding and competition assays, heparin binding, gene expression assays, ERK phosphorylation, cell proliferation assays, cord-like formation assays, cell migration assays, and neurite outgrowth assays.

[0411] Alternatively or in addition, RAGE isoforms modulate the activity of a RAGE and/or bind to or interact with RAGE ligands. Identified isoforms can be screened for such activities. Assays to screen isoforms to identify activities and functional interactions with RAGE and/or RAGE ligands are known to those of skill in the art. One of skill in the art can test a particular isoform for interaction with RAGE or a RAGE ligand and/or test to assess any change in activity compared to a RAGE. Some are exemplified herein.

[0412] 1. Ligand Binding Assays and RAGE Binding Assays

[0413] RAGE binding can be assessed directly by assessing binding a RAGE or by competitive assays with an AGE or other known ligand for binding to cells known to express a RAGE.

[0414] Ligand binding can be measured directly or indirectly for one or more than one ligand. For example, the ability of a RAGE isoform to bind to AGEs can be measured using affinity column chromatography. RAGE isoforms are expressed in cells and then cell extract, semi-purified or substantially purified RAGE isoform generated from such cells is applied to an AGE column. RAGE isoforms bound to AGE can then be eluted and quantitated by immunoblotting using anti-RAGE antibodies. In another assay, immunoprecipitation is used to assess ligand binding. Cell lysates expressing a RAGE isoform are incubated with a ligand, for example, S100P. Antibodies against the ligand S100P are used to immunoprecipitate the complex. The amount of RAGE isoform in the complex is quantified and/or detected using western blotting of the immunoprecipitates with anti-RAGE antibodies. Ligand binding assays also can include binding to ligands in the presence of other molecules. For example, ligand binding can be assessed in the presence of LF-L.

[0415] 2. Complexation

[0416] RAGE isoforms can be assayed for their ability to complex with other proteins. In one example, a RAGE isoform can be assessed for complexation with LF-L (lactoferrin-like AGE binding protein) using a ligand blotting assay (see e.g., Schmidt et al. 1994 J. Biol. Chem. 269: 9882-88). LF-L radiolabeled with ¹²⁵I (¹²⁵I-LF-L) is incubated with RAGE protein (isoform and/or wildtype form) immobilized on a solid support After washing, the amount of ¹²⁵I-LF-L associated with a RAGE isoform can be quantified.

[0417] Complexation also can be assessed in a competitive assay. RAGE is adsorbed onto polypropylene tubes such that it remains tightly bound to the tubes (see Schmidt et al. 1994 J. Biol. Chem. 269: 9882-88). ¹²⁵II-LF-L is added to the tubes alone or after preincubation with a RAGE isoform. After an incubation period, the tubes are washed and the amount of ¹²⁵I-LF-L binding is assessed by measuring the radioactivity associated with each tube. A comparison of the samples that were preincubated with a RAGE isoform versus no preincubation indicates whether the RAGE isoform competes effectively for binding to LF-L.

[0418] 3. Gene Expression Assays

[0419] RAGE isoform modulation of gene expression can be assessed for example in cell-based assays. Cells are transformed with a RAGE cDNA or control (such as a wildtype/predominant form of RAGE and/or vector alone). After an incubation period, cells are incubated with a RAGE ligand (e.g. AGEs, S100/calgranulin) and then washed. RNA is isolated from the cells and subjected to RT-PCR assays. Using RT-PCR, and primers for genes of interest, gene expression can be compared between cells containing different RAGE isoforms, with cells expressing a wildtype/predominant form of RAGE, with and without ligand and in comparison to vector alone controls. Examples of genes whose expression can be assessed includes, but is not limited to, VEGF-A, COX-2, IL-1β, COX-1, IL-6, and NF-κB. In addition, gene expression assays can be performed in a variety of cell types to assess cell-type specific affects on signal transduction, including gene expression.

[0420] Effects on gene expression also can be monitored by measuring protein expression from such genes, such as by immunoblotting with appropriate antibodies and/or by measuring enzyme activity of expression proteins, where appropriate. For example, RAGE isoform modulation of NF-κB can be assessed using a gel-shift assay. Cells transformed with a RAGE isoform or control are incubated in the presence or absence of ligand. Cell nuclear extracts are then incubated with a radiolabeled oligonucleotide that contains one or more binding sites for NF-κB. After incubation, the extracts are subjected to non-denaturing gel electrophoresis. Visualization of the migration of the radiolabel in each of the samples is assessed and compared as a measurement of NF-κB DNA binding in the samples (see for example, Bierhaus et al. 2001 Diabetes 50:2792-2808).

[0421] Reporter gene assays also can be used to measure RAGE isoform modulation of gene expression. Cells are transformed with a promoter of interest operably linked to a reporter gene, for example an NF-κB-responsive promoter operable linked to a luciferase gene (see for example, Huttunen et al. 1999 J. Biol. Chem. 274:19919-24). The cells also are transfected with a RAGE isoform or control. The transformed cells are incubated in the presence and absence of ligand. Luciferase activity is then measured in extracts from each of the cell samples and compared. Similar assays can be performed to assess modulatory affects on any gene of interest including assessing effects on endogenous RAGE expression using a RAGE promoter.

[0422] 4. Cell Proliferation Assays

[0423] Modulation of cell proliferation by RAGE isoforms can be assessed in cells transformed with a RAGE isoform. Cells, seeded at a predetermined density, such as ECV304 cells, are transformed with a RAGE cDNA or control (such as a wildtype/predominant form of RAGE and/or vector alone). After an incubation and attachment period, ligand is added and the cells are incubated again. Cell proliferation can then be assessed, for example using a 3-(4,5-dimethylthiazol-2-yl)-2,5 diphenyl-2H-tetrazolium bromide (MTT) method. (see Yonekura et al. 2003 Biochem J. 370:1097-1109).

[0424] 5. ERK Phosphorylation Assays

[0425] RAGE isoforms can be assessed for their ability to stimulate ERK phosphorylation. Endothelial cells (human microvascular EC cells) expressing RAGE or a RAGE isoform are incubated in serum-free media and then AGEs are added for an incubation period. After washing, cells are solubilized and extracts subject to SDS-PAGE. Proteins are transferred to a membrane and the amount of phosphorylated ERK is assessed by immunoreactivity with an ant-phosphoERK antibody.

[0426] 6. Cell Migration Assay

[0427] RAGE isoform effects on cell migration can be assessed. Cells, such as ECV304 cells, are stably transformed with a RAGE isoform cDNA or control (e.g. a wildtype/predominant form of RAGE and/or vector alone). The stably transformed cells are seeded onto plates and grown to confluence. Cells are wounded by denuding a strip of the monolayer of cells. After washing in serum free media, the cells are incubated with media containing serum and type I collagen. Cell cultures are photographed over time to monitor the rate of wound closure (i.e. cell migration into the wounded strip area).

[0428] 7. Neurite Outgrowth

[0429] RAGE-mediated affects on neurite outgrowth can be assessed for a RAGE isoform by stably transforming a neuroblastoma cell line with a RAGE cDNA or control. The cells are serum starved and grown overnight on amphoterin coated glass slides. Filamentous actin is stained, for example using TRITC-phalloidin and the percentage of cells bearing neuritis is assessed and compared between samples. Cells also can be stained with an antibody against RAGE (or against a tag if tagged-RAGE is expressed, e.g. a myc tag) to assess the proportion of cells expressing a RAGE isoform that formed neurite outgrowths (see for example, Huttunen et al. 1999 J. Biol. Chem. 274:19919-24).

[0430] 8. Animal Models

[0431] Assessment of a RAGE isoform on a disease or condition can be assessed in an animal model. A variety of animal models are available to diseases and conditions in which RAGE plays a role.

[0432] (a) Diabetic Vasculopathy

[0433] Diabetic vasculopathy can be assessed in a rat model. Rats are rendered diabetic by dosing with streptozocin. After 9-11 weeks of the induced diabetic condition, a RAGE isoform or a control is administered. After dosing with the RAGE isoform, tissue-blood isotope ration (TBIR) is assessed. Diabetic rats display increased vascular permeability, especially in intestine, skin and kidney compared with non-diabetic controls. The rats dosed with the RAGE isoform are compared with controls to assess the ability of the RAGE isoform. Dosage dependent effects can be assessed as well as comparisons made between isoforms and with controls including a wildtype/predominant form of RAGE and a empty vector control.

[0434] (b) Diabetic Atherosclerosis

[0435] Mice such as C57BL/6 and Balb/c strains, treated with streptozocin develop symptoms of early and non-complex atherosclerosis characteristic of human diabetes. ApoE null mice also can be tested; these mice develop spontaneous atherosclerosis symptoms on normal low-fat rodent chow. Induction of ApoE null mice with streptozocin increases the severity of the symptoms of atherosclerosis compared to untreated ApoE null mice. A RAGE isoform is administered to the mice and after a period of dosing phenotypes are assessed. Morphometric analysis can be performed on serial sections of the aortic sinus and severity and numbers of lesions (including fibrous caps and extensive monocyte and smooth muscle infiltration) is assessed. Comparisons of mice administered a RAGE isoform or control are compared to assess the ability of the RAGE isoform to arrest or reduce lesion accumulation and suppress diabetic atherosclerosis.

[0436] (c) Diabetic Inflammatory Bone Loss

[0437] Diabetic mice can be induced to display increased bone lass in gingival tissues, similar to gingivitis-periodontis seen in human diabetic subjects. C57BL/6J mice are rendered diabetic by administration of streptozotocin. One month after treatment, the mice are inoculated with the human periodontal pathogen Porphyromonas gingivalis by local oral-anal gavage and swabbing. The extent of bone loss is assessed by comparing serial sections of mandibular alveolar bone. Induction of inflammatory response is monitored through assessment of tumor necrosis factor (TNF), interleukin-6 (IL-6), matrix metalloproteinase 3 and 9 antigens (MMP3 and MMP9) using western blotting and/or enzyme assays. Diabetic mice have increased inflammatory responses and bone loss compared to non-diabetic mice. The affect of a RAGE isoform on the suppression of bone loss and/or inflammatory response is assessed by administration of a RAGE isoform directly after pathogen infection. Comparison of mice treated with a RAGE isoform to controls (vehicle alone and or mice treated with a wildtype/predominant form of RAGE) indicates the affect of the RAGE isoform on suppression of bone loss and/or proinflammatory responses.

[0438] (d) Autoimmune Diabetes

[0439] Mouse models of autoimmune diabetes can be constructed (see for example, Chen et al. 2004 J. Immunology 173 1399-1405). Splenocytes from diabetic mice are transferred into NOD/scid mice. After about 1-½ month, most of the mice receiving the transfer are diabetic. To assess the affect on a RAGE isoform for its ability to suppress diabetes, mice receiving the splenocytes also are treated with a RAGE isoform (e.g. 50 μg/day) or a control (e.g. mouse albumin). Onset of diabetes is compared between the RAGE isoform-treated and control mice.

[0440] Suppression of recurrent autoimmune diabetes also can be assessed by constructing a mouse diabetic model using islet grafts. Diabetic immune-competent NOD mice are grafted with islets (e.g. 500 islets) underneath the kidney capsule. Animals with the graft usually have disease recurrence within 30 days. To assess the ability of a RAGE isoform to suppress disease recurrence, a RAGE isoform is administered following islet transplant and disease symptoms, including blood glucose level are compared with controls.

I. Preparation, Formulation and Administration of RAGE Isoforms and RAGE Isoform Compositions

[0441] RAGE isoforms and RAGE isoform compositions can be formulated for administration by any route known to those of skill in the art including intramuscular, intravenous, intradermal, intraperitoneal injection, subcutaneous, epidural, nasal oral, rectal, topical, inhalational, buccal (e.g., sublingual), and transdermal administration or any route. RAGE isoforms can be administered by any convenient route, for example by infusion or bolus injection, by absorption through epithelial or mucocutaneous linings (e.g., oral mucosa, rectal and intestinal mucosa, etc.) and can be administered with other biologically active agents, either sequentially, intermittently or in the same composition. Administration can be local, topical or systemic depending upon the locus of treatment. Local administration to an area in need of treatment can be achieved by, for example, but not limited to, local infusion during surgery, topical application, e.g., in conjunction with a wound dressing after surgery, by injection, by means of a catheter, by means of a suppository, or by means of an implant. Administration also can include controlled release systems including controlled release formulations and device controlled release, such as by means of a pump. The most suitable route in any given case depends on a variety of factors, such as the nature of the disease, the progress of the disease, the severity of the disease the particular composition which is used.

[0442] Various delivery systems are known and can be used to administer RAGE isoforms, such as but not limited to, encapsulation in liposomes, microparticles, microcapsules, recombinant cells capable of expressing the compound, receptor mediated endocytosis, and delivery of nucleic acid molecules encoding RAGE isoforms such as retrovirus delivery systems.

[0443] Pharmaceutical compositions containing RAGE isoforms can be prepared. Generally, pharmaceutically acceptable compositions are prepared in view of approvals for a regulatory agency or other prepared in accordance with generally recognized pharmacopeia for use in animals and in humans. Pharmaceutical compositions can include carriers such as a diluent, adjuvant, excipient, or vehicle with which an isoform is administered. Such pharmaceutical carriers can be sterile liquids, such as water and oils, including those of petroleum, animal, vegetable or synthetic origin, such as peanut oil, soybean oil, mineral oil, and sesame oil. Water is a typical carrier when the pharmaceutical composition is administered intravenously. Saline solutions and aqueous dextrose and glycerol solutions also can be employed as liquid carriers, particularly for injectable solutions. Compositions can contain along with an active ingredient: a diluent such as lactose, sucrose, dicalcium phosphate, or carboxymethylcellulose; a lubricant, such as magnesium stearate, calcium stearate and talc; and a binder such as starch, natural gums, such as gum acaciagelatin, glucose, molasses, polyinylpyrrolidine, celluloses and derivatives thereof, povidone, crospovidones and other such binders known to those of skill in the art. Suitable pharmaceutical excipients include starch, glucose, lactose, sucrose, gelatin, malt, rice, flour, chalk, silica gel, sodium stearate, glycerol monostearate, talc, sodium chloride, dried skim milk, glycerol, propylene, glycol, water, and ethanol. A composition, if desired, also can contain minor amounts of wetting or emulsifying agents, or pH buffering agents, for example, acetate, sodium citrate, cyclodextrine derivatives, sorbitan monolaurate, triethanolamine sodium acetate, triethanolamine oleate, and other such agents. These compositions can take the form of solutions, suspensions, emulsion, tablets, pills, capsules, powders, and sustained release formulations. A composition can be formulated as a suppository, with traditional binders and carriers such as triglycerides. Oral formulation can include standard carriers such as pharmaceutical grades of mannitol, lactose, starch, magnesium stearate, sodium saccharine, cellulose, magnesium carbonate, and other such agents. Examples of suitable pharmaceutical carriers are described in “Remington's Pharmaceutical Sciences” by E. W. Martin. Such compositions will contain a therapeutically effective amount of the compound, generally in purified form, together with a suitable amount of carrier so as to provide the form for proper administration to a subject or patient. The formulation should suit the mode of administration.

[0444] Formulations are provided for administration to humans and animals in unit dosage forms, such as tablets, capsules, pills, powders, granules, sterile parenteral solutions or suspensions, and oral solutions or suspensions, and oil water emulsions containing suitable quantities of the compounds or pharmaceutically acceptable derivatives thereof. Pharmaceutically therapeutically active compounds and derivatives thereof are typically formulated and administered in unit dosage forms or multiple dosage forms. Each unit dose contains a predetermined quantity of therapeutically active compound sufficient to produce the desired therapeutic effect, in association with the required pharmaceutical carrier, vehicle or diluent. Examples of unit dose forms include ampoules and syringes and individually packaged tablets or capsules. Unit dose forms can be administered in fractions or multiples thereof. A multiple dose form is a plurality of identical unit dosage forms packaged in a single container to be administered in segregated unit dose form. Examples of multiple dose forms include vials, bottles of tablets or capsules or bottles of pints or gallons. Hence, multiple dose form is a multiple of unit doses that are not segregated in packaging.

[0445] Dosage forms or compositions containing active ingredient in the range of 0.005% to 100% with the balance made up from non-toxic carrier can be prepared. For oral administration, pharmaceutical compositions can take the form of, for example, tablets or capsules prepared by conventional means with pharmaceutically acceptable excipients such as binding agents (e.g., pregelatinized maize starch, polyvinyl pyrrolidone or hydroxypropyl methylcellulose); fillers (e.g., lactose, microcrystalline cellulose or calcium hydrogen phosphate); lubricants (e.g., magnesium stearate, talc or silica); disintegrants (e.g., potato starch or sodium starch glycolate); or wetting agents (e.g., sodium lauryl sulphate). The tablets can be coated by methods well-known in the art.

[0446] Pharmaceutical preparation also can be in liquid form, for example, solutions, syrups or suspensions, or can be presented as a drug product for reconstitution with water or other suitable vehicle before use. Such liquid preparations can be prepared by conventional means with pharmaceutically acceptable additives such as suspending agents (e.g., sorbitol syrup, cellulose derivatives or hydrogenated edible fats); emulsifying agents (e.g., lecithin or acacia); non-aqueous vehicles (e.g., almond oil, oily esters, or fractionated vegetable oils); and preservatives (e.g., methyl or propyl-p-hydroxybenzoates or sorbic acid).

[0447] Formulations suitable for rectal administration can be provided as unit dose suppositories. These can be prepared by admixing the active compound with one or more conventional solid carriers, for example, cocoa butter, and then shaping the resulting mixture.

[0448] Formulations suitable for topical application to the skin or to the eye include ointments, creams, lotions, pastes, gels, sprays, aerosols and oils. Exemplary carriers include vaseline, lanoline, polyethylene glycols, alcohols, and combinations of two or more thereof. The topical formulations also can contain 0.05 to 15, 20, 25 percent by weight of thickeners selected from among hydroxypropyl methyl cellulose, methyl cellulose, polyvinylpyrrolidone, polyvinyl alcohol, poly (alkylene glycols), poly/hydroxyalkyl, (meth)acrylates or poly(meth)acrylamides. A topical formulation is often applied by instillation or as an ointment into the conjunctival sac. It also can be used for irrigation or lubrication of the eye, facial sinuses, and external auditory meatus. It also can be injected into the anterior eye chamber and other places. A topical formulation in the liquid state can be also present in a hydrophilic three-dimensional polymer matrix in the form of a strip or contact lens, from which the active components are released.

[0449] For administration by inhalation, the compounds for use herein can be delivered in the form of an aerosol spray presentation from pressurized packs or a nebulizer, with the use of a suitable propellant, e.g., dichlorodifluoromethane, trichlorofluoromethane, dichlorotetrafluoroethane, carbon dioxide or other suitable gas. In the case of a pressurized aerosol, the dosage unit can be determined by providing a valve to deliver a metered amount. Capsules and cartridges of, e.g., gelatin, for use in an inhaler or insufflator can be formulated containing a powder mix of the compound and a suitable powder base such as lactose or starch.

[0450] Formulations suitable for buccal (sublingual) administration include, for example, lozenges containing the active compound in a flavored base, usually sucrose and acacia or tragacanth; and pastilles containing the compound in an inert base such as gelatin and glycerin or sucrose and acacia.

[0451] Pharmaceutical compositions of RAGE isoforms can be formulated for parenteral administration by injection, e.g., by bolus injection or continuous infusion. Formulations for injection can be presented in unit dosage form, e.g., in ampules or in multi-dose containers, with an added preservative. The compositions can be suspensions, solutions or emulsions in oily or aqueous vehicles, and can contain formulatory agents such as suspending, stabilizing and/or dispersing agents. Alternatively, the active ingredient can be in powder form for reconstitution with a suitable vehicle, e.g., sterile pyrogen-free water or other solvents, before use.

[0452] Formulations suitable for transdermal administration are provided. They can be provided in any suitable format, such as discrete patches adapted to remain in intimate contact with the epidermis of the recipient for a prolonged period of time. Such patches contain the active compound in optionally buffered aqueous solution of, for example, 0.1 to 0.2M concentration with respect to the active compound. Formulations suitable for transdermal administration also can be delivered by iontophoresis (see, e.g., Pharmaceutical Research 3(6), 318 (1986)) and typically take the form of an optionally buffered aqueous solution of the active compound.

[0453] Pharmaceutical compositions also can be administered by controlled release formulations and/or delivery devices (see, e.g., in U.S. Pat. Nos. 3,536,809; 3,598,123; 3,630,200; 3,845,770; 3,847,770; 3,916,899; 4,008,719; 4,687,610; 4,769,027; 5,059,595; 5,073,543; 5,120,548; 5,354,566; 5,591,767; 5,639,476; 5,674,533 and 5,733,566).

[0454] In certain embodiments, liposomes and/or nanoparticles also can be employed with RAGE isoform administration. Liposomes are formed from phospholipids that are dispersed in an aqueous medium and spontaneously form multilamellar concentric bilayer vesicles (also termed multilamellar vesicles (MLVs). MLVs generally have diameters of from 25 nm to 4 μm. Sonication of MLVs results in the formation of small unilamellar vesicles (SUVs) with diameters in the range of 200 to 500 .ANG., containing an aqueous solution in the core.

[0455] Phospholipids can form a variety of structures other than liposomes when dispersed in water, depending on the molar ratio of lipid to water. At low ratios, the liposomes form. Physical characteristics of liposomes depend on pH, ionic strength and the presence of divalent cations. Liposomes can show low permeability to ionic and polar substances, but at elevated temperatures undergo a phase transition which markedly alters their permeability. The phase transition involves a change from a closely packed, ordered structure, known as the gel state, to a loosely packed, less-ordered structure, known as the fluid state. This occurs at a characteristic phase-transition temperature and results in an increase in permeability to ions, sugars and drugs.

[0456] Liposomes interact with cells via different mechanisms: Endocytosis by phagocytic cells of the reticuloendothelial system such as macrophages and neutrophils; adsorption to the cell surface, either by nonspecific weak hydrophobic or electrostatic forces, or by specific interactions with cell-surface components; fusion with the plasma cell membrane by insertion of the lipid bilayer of the liposome into the plasma membrane, with simultaneous release of liposomal contents into the cytoplasm; and by transfer of liposomal lipids to cellular or subcellular membranes, or vice versa, without any association of the liposome contents. Varying the liposome formulation can alter which mechanism is operative, although more than one may operate at the same time.

[0457] Nanocapsules can generally entrap compounds in a stable and reproducible way. To avoid side effects due to intracellular polymeric overloading, such ultrafine particles (sized around 0.1 μm) should be designed using polymers able to be degraded in vivo. Biodegradable polyalkyl-cyanoacrylate nanoparticles that meet these requirements are contemplated for use herein, and such particles can be easily made.

[0458] Administration methods can be employed to decrease the exposure of RAGE isoforms to degradative processes, such as proteolytic degradation and immunological intervention via antigenic and immunogenic responses. Examples of such methods include local administration at the site of treatment. Pegylation of therapeutics has been reported to increase resistance to proteolysis; increase plasma half-life, and decrease antigenicity and immunogenicity. Examples of pegylation methodologies are known in the art (see for example, Lu and Felix, Int. J. Peptide Protein Res., 43: 127-138, 1994; Lu and Felix, Peptide Res., 6: 142-6, 1993; Felix et al., Int. J. Peptide Res., 46: 253-64, 1995; Benhar et al., J. Biol. Chem., 269: 13398-404, 1994; Brumeanu et al., J Immunol., 154: 3088-95, 1995; see also, Caliceti et al. (2003)Adv. Drug Deliv. Rev. 55(10):1261-77 and Molineux (2003) Pharmacotherapy 23 (8 Pt 2):3S-8S). Pegylation also can be used in the delivery of nucleic acid molecules in vivo. For example, pegylation of adenovirus can increase stability and gene transfer (see, e.g., Cheng et al. (2003) Pharm. Res. 20(9): 1444-51).

[0459] Desirable blood levels can be maintained by a continuous infusion of the active agent as ascertained by plasma levels. It should be noted that the attending physician would know how to and when to terminate, interrupt or adjust therapy to lower dosage due to toxicity, or bone marrow, liver or kidney dysfunctions. Conversely, the attending physician would also know how to and when to adjust treatment to higher levels if the clinical response is not adequate (precluding toxic side effects). administered, for example, by oral, pulmonary, parental (intramuscular, intraperitoneal, intravenous (IV) or subcutaneous injection), inhalation (via a fine powder formulation), transdermal, nasal, vaginal, rectal, or sublingual routes of administration and can be formulated in dosage forms appropriate for each route of administration (see, e.g., International PCT application Nos. WO 93/25221 and WO 94/17784; and European Patent Application 613,683).

[0460] A RAGE isoform is included in the pharmaceutically acceptable carrier in an amount sufficient to exert a therapeutically useful effect in the absence of undesirable side effects on the subject or patient treated. Therapeutically effective concentration can be determined empirically by testing the compounds in known in vitro and in vivo systems, such as the assays provided herein.

[0461] The concentration a RAGE isoform in the composition depends on absorption, inactivation and excretion rates of the complex, the physicochemical characteristics of the complex, the dosage schedule, and amount administered as well as other factors known to those of skill in the art. The amount of a RAGE isoform to be administered for the treatment of a disease or condition, for example cancer, autoimmune disease and infection can be determined by standard clinical techniques. In addition, in vitro assays and animal models can be employed to help identify optimal dosage ranges. The precise dosage, which can be determined empirically, can depend on the route of administration and the seriousness of the disease. Suitable dosage ranges for administration can range from about 0.01 pg/kg body weight to 1 mg/kg body weight and more typically 0.05 mg/kg to 200 mg/kg RAGE isoform: patient (subject) weight.

[0462] A RAGE isoform can be administered at once, or can be divided into a number of smaller doses to be administered at intervals of time. RAGE isoforms can be administered in one or more doses over the course of a treatment time for example over several hours, days, weeks, or months. In some cases, continuous administration is useful. It is understood that the precise dosage and duration of treatment is a function of the disease being treated and can be determined empirically using known testing protocols or by extrapolation from in vivo or in vitro test data. It is to be noted that concentrations and dosage values also can vary with the severity of the condition to be alleviated. It is to be further understood that for any particular subject, specific dosage regimens should be adjusted over time according to the individual need and the professional judgment of the person administering or supervising the administration of the compositions, and that the concentration ranges set forth herein are exemplary only and are not intended to limit the scope or use of compositions and combinations containing them. The compositions can be administered hourly, daily, weekly, monthly, yearly or once. The mode of administration of the composition containing the polypeptides as well as compositions containing nucleic acids for gene therapy, includes, but is not limited to intralesional, intraperitoneal, intramuscular and intravenous administration. Also included are infusion, intrathecal, subcutaneous, liposome-mediated, depot-mediated administration. Also included, are nasal, ocular, oral, topical, local and otic delivery. Dosages can be empirically determined and depend upon the indication, mode of administration and the subject. Exemplary dosages include from 0.1, 1, 10, 100, 200 and more mg/day/kg weight of the subject.

J. In Vivo Expression of RAGE Isoforms and Gene Therapy

[0463] Rage isoforms can be delivered to cells and tissues by expression of nucleic acid molecules. RAGE isoforms can be administered as nucleic acid molecules encoding a RAGE isoform, including ex vivo techniques and direct in vivo expression.

[0464] 1. Delivery of Nucleic Acids

[0465] Nucleic acids can be delivered to cells and tissues by any method known to those of skill in the art.

[0466] a. Vectors—Episomal and Integrating

[0467] Methods for administering RAGE isoforms by expression of encoding nucleic acid molecules include administration of recombinant vectors. The vector can be designed to remain episomal, such as by inclusion of an origin of replication or can be designed to integrate into a chromosome in the cell. RAGE isoforms also can be used in ex vivo gene expression therapy using non-viral vectors. For example, cells can be engineered to express a RAGE isoform, such as by integrating a RAGE isoform encoding-nucleic acid into a genomic location, either operatively linked to regulatory sequences or such that it is placed operatively linked to regulatory sequences in a genomic location. Such cells then can be administered locally or systemically to a subject, such as a patient or subject in need of treatment.

[0468] Viral vectors, include, for example adenoviruses, herpes viruses, retroviruses and others designed for gene therapy can be employed, The vectors can remain episomal or can integrate into chromosomes of the treated subject. A RAGE isoform can be expressed by a virus, which is administered to a subject in need of treatment. Virus vectors suitable for gene therapy include adenovirus, adeno-associated virus, retroviruses, lentiviruses and others noted above. For example, adenovirus expression technology is well-known in the art and adenovirus production and administration methods also are well known. Adenovirus serotypes are available, for example, from the American Type Culture Collection (ATCC, Rockville, Md.). Adenovirus can be used ex vivo, for example, cells are isolated from a patient or subject in need of treatment, and transduced with a RAGE isoform-expressing adenovirus vector. After a suitable culturing period, the transduced cells are administered to a subject, locally and/or systemically. Alternatively, RAGE isoform-expressing adenovirus particles are isolated and formulated in a pharmaceutically-acceptable carrier for delivery of a therapeutically effective amount to prevent, treat or ameliorate a disease or condition of a subject. Typically, adenovirus particles are delivered at a dose ranging from 1 particle to 1014 particles per kilogram subject weight, generally between 106 or 108 particles to 1012 particles per kilogram subject weight. In some situations it is desirable to provide a nucleic acid source with an agent that targets cells, such as an antibody specific for a cell surface membrane protein or a target cell, or a ligand for a receptor on a target cell.

[0469] b. Artificial Chromosomes and Other Non-Viral Vector Delivery Methods

[0470] The nucleic acid molecules can be introduced into artificial chromosomes and other non-viral vectors. Artificial chromosomes (see, e.g., U.S. Pat. No. 6,077,697 and PCT International PCT application No. WO 02/097059) can be engineered to encode and express the isoform.

[0471] c. Liposomes and Other Encapsulated Forms and Administration of Cells Containing the Nucleic Acids

[0472] The nucleic acids can be encapsulated in a vehicle, such as a liposome, or introduced into a cells, such as a bacterial cell, particularly an attenuated bacterium or introduced into a viral vector. For example, when liposomes are employed, proteins that bind to a cell surface membrane protein associated with endocytosis can be used for targeting and/or to facilitate uptake, e.g. capsid proteins or fragments thereof tropic for a particular cell type, antibodies for proteins which undergo internalization in cycling, and proteins that target intracellular localization and enhance intracellular half-life.

[0473] 2. In Vitro and Ex Vivo Delivery

[0474] For ex vivo and in vivo methods, nucleic acid molecules encoding the RAGE isoform is introduced into cells that are from a suitable donor or the subject to the treated. Cells into which a nucleic acid can be introduced for purposes of therapy include, for example, any desired, available cell type appropriate for the disease or condition to be treated, including but not limited to epithelial cells, endothelial cells, keratinocytes, fibroblasts, muscle cells, hepatocytes; blood cells such as T lymphocytes, B lymphocytes, monocytes, macrophages, neutrophils, eosinophils, megakaryocytes, granulocytes; various stem or progenitor cells, in particular hematopoietic stem or progenitor cells, e.g., such as stem cells obtained from bone marrow, umbilical cord blood, peripheral blood, fetal liver, and other sources thereof.

[0475] For ex vivo treatment, cells from a donor compatible with the subject to be treated or the subject to be treated cells are removed, the nucleic acid is introduced into these isolated cells and the modified cells are administered to the subject. Treatment includes direct administration, such as or, for example, encapsulated within porous membranes, which are implanted into the patient or subject (see, e.g. U.S. Pat. Nos. 4,892,538 and 5,283,187). Techniques suitable for the transfer of nucleic acid into mammalian cells in vitro include the use of liposomes and cationic lipids (e.g., DOTMA, DOPE and DC-Chol) electroporation, microinjection, cell fusion, DEAE-dextran, and calcium phosphate precipitation methods. Methods of DNA delivery can be used to express RAGE isoforms in vivo. Such methods include liposome delivery of nucleic acids and naked DNA delivery, including local and systemic delivery such as using electroporation, ultrasound and calcium-phosphate delivery. Other techniques include microinjection, cell fusion, chromosome-mediated gene transfer, microcell-mediated gene transfer and spheroplast fusion.

[0476] In vivo expression of a RAGE isoform can be linked to expression of additional molecules. For example, expression of a RAGE isoform can be linked with expression of a cytotoxic product such as in an engineered virus or expressed in a cytotoxic virus. Such viruses can be targeted to a particular cell type that is a target for a therapeutic effect. The expressed a RAGE isoform can be used to enhance the cytotoxicity of the virus.

[0477] In vivo expression of a RAGE isoform can include operatively linking a RAGE isoform encoding nucleic acid molecule to specific regulatory sequences such as a cell-specific or tissue-specific promoter. RAGE isoforms also can be expressed from vectors that specifically infect and/or replicate in target cell types and/or tissues. Inducible promoters can be use to selectively regulate RAGE isoform expression.

[0478] 3. Systemic, Local and Topical Delivery

[0479] Nucleic acid molecules, as naked nucleic acids or in vectors, artificial chromosomes, liposomes and other vehicles can be administered to the subject by systemic administration, topical, local and other routes of administration. When systemic and in vivo, the nucleic acid molecule or vehicle containing the nucleic acid molecule can be targeted to a cell.

[0480] Administration also can be direct, such as by administration of a vector or cells that typically targets a cell or tissue. For example, tumor cells and proliferating can be targeted cells for in vivo expression of RAGE isoforms. Cells used for in vivo expression of an isoform also include cells autologous to the patient or subject. Such cells can be removed from a patient or subject, nucleic acids for expression of a RAGE isoform introduced, and then administered to a patient or subject such as by injection or engraftment.

K. RAGE and Angiogenesis

[0481] RAGE is involved in angiogenesis (see FIG. 1 and definitions and discussion above). For example AGE-RAGE interaction elicits angiogenesis through transcriptional activation of the VEGF gene via NF-κB and AP-1 factor. Modulation of RAGE activation can increase or decrease or alter angiogenic processes. Angiogenesis is a process by which new blood vessels are formed. It occurs for example, in a healthy body for healing wounds and for restoring blood flow to tissues after injury or insult. In females, angiogenesis also occurs during the monthly reproductive cycle to rebuild the uterus lining, to mature the egg during ovulation and during pregnancy to build the placenta. Angiogenesis is controlled through a series of “on” and “off” switches. The main “on” switches are known as angiogenesis-stimulating growth factors. The main “off switches” are known as angiogenesis inhibitors. When angiogenic growth factors are produced in excess of angiogenesis inhibitors, the balance is tipped in favor of blood vessel growth. When inhibitors are present in excess of stimulators, angiogenesis is stopped. A healthy body maintains a balance of angiogenesis modulators. Angiogenic growth factors are known. These include, for example, angiogenin, angiopoietin-1, Del-1, fibroblast growth factors: acidic (aFGF) and basic (bFGF), follistatin, granulocyte colony-stimulating factor (G-CSF), hepatocyte growth factor (HGF), scatter factor (SF), interleukin-8 (IL-8), leptin, midkine, placental growth factor, platelet-derived endothelial cell growth factor (PD-ECGF), platelet-derived growth factor-BB (PDGF-BB), pleiotrophin (PTN), progranulin, proliferin, transforming growth factor-alpha (TGF-alpha), transforming growth factor-beta (TGF-beta), tumor necrosis factor-alpha (TNF-alpha), and vascular endothelial growth factor (VEGF)/vascular permeability factor (VPF).

[0482] 1. Angiogenesis and Disease

[0483] Cellular receptors for angiogenic factors (positive and negative) can act as points of intervention in multiple disease processes, for example, in diseases and conditions where the balance of angiogenic growth factors has been altered and/or the amount or timing of angiogenesis is altered. For example, in some situations ‘too much’ angiogenesis can be detrimental, such as angiogenesis that supplies blood to tumor foci, in inflammatory responses and other aberrant angiogenic-related conditions. The growth of tumors, or sites of proliferation in chronic inflammation, generally requires the recruitment of neighboring blood vessels and vascular endothelial cells to support their metabolic requirements. This is because the diffusion is limited for oxygen in tissues. Exemplary conditions that require angiogenesis include, but are not limited to solid tumors and hematologic malignancies such as lymphomas, acute leukemia, and multiple myeloma, where increased numbers of blood vessels are observed in the pathologic bone marrow.

[0484] A critical element in the growth of primary tumors and formation of metastatic sites is the angiogenic switch: the ability of the tumor or inflammatory site to promote the formation of new capillaries from preexisting host vessels. The angiogenic switch, as used in this context, refers to disease-associated angiogenesis required for the progression of cancer and inflammatory diseases, such as rheumatoid arthritis. It is a switch that activates a cascade of physiological activities that finally result in the extension of new blood vessels to support the growth of diseased tissue. Stimuli for neo-angiogenesis include hypoxia, inflammation, and genetic lesions in oncogenes or tumor suppressors that alter disease cell gene expression.

[0485] Angiogenesis also play a role in inflammatory diseases. These diseases have a proliferative component, similar to a tumor focus. In rheumatoid arthritis, one component of this is characterized by aberrant proliferation of synovial fibroblasts, resulting in pannus formation. The pannus is composed of synovial fibroblasts which have some phenotypic characteristics with transformed cells. As a pannus grows within the joint it expresses many proangiogenic signals, and experiences many of the same neo-angiogenic requirements as a tumor. The need for additional blood supply, neoangiogenesis, is critical. Similarly, many chronic inflammatory conditions also have a proliferative component in which some of the cells composing it may have characteristics usually attributed to transformed cells.

[0486] Another example of a condition involving excess angiogenesis is diabetic retinopathy (Lip et al. Br J Ophthalmology 88: 1543, 2004)). Diabetic retinopathy has angiogenic, inflammatory and proliferative components; overexpression of VEGF, and angiopoietin-2 are common. This overexpression is likely required for disease-associated remodeling and branching of blood vessels, which then supports the proliferative component of the disease.

[0487] 2. The Angiogenic Process

[0488] Angiogenesis includes several steps, including the recruitment of circulating endothelial cell precursors (CEPs), stimulation of new endothelial cell (EC) growth by growth factors, the degradation of the ECM by proteases, proliferation of ECs and migration into the target, which could be a tumor site or another proliferative site caused by inflammation. This results in the eventual formation of new capillary tubes. Such blood vessels are not necessarily normal in structure. They may have chaotic architecture and blood flow. Due to an imbalance of angiogenic regulators such as vascular endothelial growth factor, (VEGF) and angiopoietins, the new vessels supplying tumorous or inflammatory sites are tortuous and dilated with an uneven diameter, excessive branching, and shunting. Blood flow is variable, with areas of hypoxia and acidosis leading to the selection of variants that are resistant to hypoxia-induced apoptosis (often due to the loss of p53 expression); and enhanced production of proangiogenic signals. Disease-associated vessel walls have numerous openings, widened interendothelial junctions, and discontinuous or absent basement membrane; this contributes to the high vascular permeability of these vessels and, together with lack of functional lymphatics/drainage, causes interstitial hypertension. Disease-associated blood vessels may lack perivascular cells such as pericytes and smooth muscle cells that normally regulate vasoactive control in response to tissue metabolic needs. Unlike normal blood vessels, the vascular lining of tumor vessels is not a homogenous layer of ECs but often consists of a mosaic of ECs and tumor cells; the concept of cancer cell-derived vascular channels, which may be lined by ECM secreted by the tumor cells, is referred to as vascular mimicry.

[0489] A similar situation occurs where blood vessels rapidly invade sites of acute inflammation. The ECs of angiogenic blood vessels are unlike quiescent ECs found in adult vessels, where only 0.01% of ECs are dividing. During tumor angiogenesis, ECs are highly proliferative and express a number of plasma membrane proteins that are characteristic of activated endothelium, including growth factor receptors and adhesion molecules such as integrins. Tumors utilize a number of mechanisms to promote their vascularization, and in each case they subvert normal angiogenic processes to suit this purpose. For this reason, increased production of angiogenic factors, both proliferative with respect to endothelium; and structural (allowing for increased branching of the neovasculature) are likely to occur in disease foci, as in cancer or chronic inflammatory disease.

[0490] 3. Cell Surface Receptors in Angiogenesis

[0491] Cell surface receptors including RTKs, and their ligands play a role in the regulation of angiogenesis (see for example, FIG. 1). Angiogenic endothelium expresses a number of receptors not found on resting endothelium. These include receptor tyrosine kinases (RTK) and integrins that bind to the extracellular matrix and mediate endothelial cells adhesion, migration, and invasion.

[0492] Endothelial cells (ECs) also express RTK (i.e., the FGF and PDGF receptors) that are found on many other cell types. Functions mediated by activated RTK include proliferation, migration, and enhanced survival of endothelial cells, as well as regulation of the recruitment of perivascular cells and bloodborne circulating endothelial precursors and hematopoietic stem cells to the tumor. One example of a CSR involved in angiogenesis is VEGFR. VEGFR1 receptors and VEGF-A ligand are involved in cell proliferation, migration and differentiation in angiogenesis. VEGF-A is a heparin-binding glycoprotein with at least four isoforms that regulate blood vessel formation by binding to RTKs, VEGFR1 and VEGFR2. These VEGF receptors are expressed on all ECs in addition to a subset of hematopoietic cells. VEGFR2 regulates EC proliferation, migration, and survival, while VEGFR1 may act as an antagonist of R1 in ECs but also can plays a role in angioblast differentiation during embryogenesis.

[0493] Additional signaling pathways also are involved in angiogenesis. The angiopoietin, Ang1, produced by stromal cells, binds to the EC RTK Tie-2 and promotes the interaction of ECs with the ECM and perivascular cells, such as pericytes and smooth muscle cells, to form tight, non-leaky vessels. PDGF and basic fibroblast growth factor (bFGF) help to recruit these perivascular cells. Ang1 is required for maintaining the quiescence and stability of mature blood vessels and prevents the vascular permeability normally induced by VEGF and inflammatory cytokines.

[0494] Proangiogenic cytokines, chemokines, and growth factors secreted by stromal cells or inflammatory cells make important contributions to neovascularization, including bFGF, transforming growth factor-alpha, TNF-alpha, and IL-8. In contrast to normal endothelium, angiogenic endothelium overexpresses specific members of the integrin family of ECM-binding proteins that mediate EC adhesion, migration, and survival. Integrins mediate spreading and migration of ECs and are required for angiogenesis induced by VEGF and bFGF, which in turn can upregulate EC integrin expression. EC adhesion molecules can be upregulated (i.e., by VEGF, TNF-alpha). VEGF promotes the mobilization and recruitment of circulating endothelial cell precursors (CEPs) and hematopoietic stem cells (HSCs) to tumors where they colocalize and appear to cooperate in neovessel formation. CEPs express VEGFR2, while HSCs express VEGFR1, a receptor, or VEGF and PIGF. Both CEPs and HSCs are derived from a common precursor, the hemangioblast. CEPs are thought to differentiate into ECs, whereas the role of HSC-derived cells (such as tumor-associated macrophages) may be to secrete angiogenic factors required for sprouting and stabilization of ECs (VEGF, bFGF, angiopoietins) and to activate MMPs, resulting in ECM remodeling and growth factor release. In mouse tumor models and in human cancers, increased numbers of CEPs and subsets of VEGFR1 or VEGFR-expressing HSCs can be detected in the circulation, which may correlate with increased levels of serum VEGF.

[0495] 4. Cell Surface Receptors in Tumors

[0496] Tumor vessels appear to be more dependent on VEGFR signaling for growth and survival than normal ECs. Tumors secrete trophic angiogenic molecules, such as VEGF family of endothelial growth factors, that induce the proliferation and migration of host ECs into the tumor. Sprouting in normal and pathogenic angiogenesis is regulated by three families of transmembrane RTKs expressed on ECs and their ligands—VEGFs, angiopoietins, and ephrins, which are produced by tumor cells, inflammatory cells, or stromal cells in the microenvironment of the disease site. Tumor or inflammatory disease-associated angiogenesis is a complex process involving many different cell types that proliferate, migrate, invade, and differentiate in response to signals from microenvironment. Endothelial cells (ECs) sprout from host vessels in response to VEGF, bFGF, Ang2, and other proangiogenic stimuli. Sprouting is stimulated by VEGF/VEGFR2, Ang2/Tie-2, and integrin/extracellular matrix (ECM) interactions. Bone marrow-derived circulating endothelial precursors (CEPs) migrate to the tumor in response to VEGF and differentiate into ECs, while hematopoietic stem cells differentiate into leukocytes, including tumor/disease site-associated macrophages that secrete angiogenic growth factors and produce MMPs that remodel the ECM and release bound growth factors.

[0497] When tumor cells arise in or metastasize to an avascular area, they grow to a size limited by hypoxia and nutrient deprivation. This condition, also likely to occur in other localized proliferative diseases, leads to the selection of cells that produce angiogenic factors. Hypoxia, a key regulator of tumor angiogenesis, causes the transcriptional induction of the gene(s) encoding VEGF by a process that involves stabilization of the transcription factor hypoxia-inducible factor (HIF)1. Under normoxic conditions, EC HIF-1 levels are maintained at a low level by proteasome-mediated destruction regulated by a ubiquitin E3-ligase encoded by the VHL tumor-suppressor locus. However, under hypoxic conditions, the HIF-1 protein is not hydroxylated and association with VHL does not occur; therefore HIF-1 levels increase, and target genes including VEGF, nitric oxide synthetase (NOS), and Ang2 are induced. Loss of the VHL genes, as occurs in familial and sporadic renal cell carcinomas, also results in HIF-1 stabilization and induction of VEGF. Most tumors have hypoxic regions due to poor blood flow, and tumor cells in these areas stain positive for HIF-1 expression. These are conditions that lead to the de novo formation of blood vessels from differentiating endothelial cells, as occurs during embryonic development) and angiogenesis under normal (wound healing, corpus luteum formation) and pathologic processes (tumor angiogenesis, inflammatory conditions such as rheumatoid arthritis).

[0498] For diseased cell-derived VEGF, such as may be produced by a growing tumor focus or by pannus formation in rheumatoid arthritis, to initiate sprouting from host vessels, the stability conferred by the Ang1/Tie2 pathway must be perturbed; this occurs by the secretion of Ang2 by ECs that are undergoing active remodeling. Ang2 binds to Tie2 and is a competitive inhibitor of Ang1 action: under the influence of Ang2, preexisting blood vessels become more responsive to remodeling signals, with less adherence of ECs to stroma and associated perivascular cells and more responsiveness to VEGF. Therefore, Ang2 is required at early stages of neoangiogenesis for destabilizing the vasculature by making host ECs more sensitive to angiogenic signals. Since tumor ECs are blocked by Ang2, there is no stabilization by the Ang1/Tie2 interaction, and tumor blood vessels are leaky, hemorrhagic, and have poor association of ECs with underlying stroma. Sprouting tumor ECs express high levels of the transmembrane protein Ephrin-B2 and its receptor, the RTK EPH whose signaling works with the angiopoietins during vessel remodeling. During embryogenesis, EPH receptors are expressed on the endothelium of primordial venous vessels while the transmembrane ligand ephrin-B2 is expressed by cells of primordial arteries; the reciprocal expression may regulate differentiation and patterning of the vasculature.

[0499] Development of tumor lymphatics also is associated with expression of cell surface receptors, including VEGFR3 and its ligands VEGF-C and VEGF-D. The role of these vessels in tumor cell metastasis to regional lymph nodes remains to be determined, since, as discussed above, interstitial pressures within tumors are high and most lymphatic vessels may exit in a collapsed and nonfunctional state. However, VEGF-C levels in primary human tumors, including lung, prostate, and colorectal cancers, correlate significantly with metastasis to regional lymph nodes, and therefore it is possible that expression of VEGF-C,D/R3 may contribute to disease spreading by maintaining an exit for tumor cells from the primary site to lymph nodes and beyond.

[0500] 5. RAGE and RAGE Ligands in Angiogenesis

[0501] Advanced glycation end products (AGEs) are the result of a nonenzymatic reaction of reducing sugars with primary amino groups of proteins (Maillard reaction). They accumulate in various tissues in the course of aging. Because AGEs induce protein cross-links and oxidative stress (radicals) within cells and tissues, they have been implicated in the development of many degenerative diseases. Binding of AGEs to their cognate receptors (RAGE) induces the release of profibrotic cytokines, such as TGF-beta or proinflammatory cytokines, such as TNF-alpha or IL-6 (Simm et al., Ann. NY Acad. Sci. 1019: 228, 2004). AGEs internalized by heart vasculature, eye vasculature and other sites to create brittle and leaky blood vessels (see FIG. 1).

[0502] One of the targets that is adversely affected by AGEs is the pericyte, which provides support for stable and developing vasculature (reviewed by Stitt, Br J. Ophthalmol. 85: 746, 2001). In microvasculature, pericytes regulate growth and also serve to protect ECs. Pericyte protective functions include preserving the prostracyclin-producing ability of ECs and protecting ECs against lipid-peroxide induced injury. Hence, pericytes play a role in the maintenance of microvasculature homeostasis. AGEs including glycer-AGE and glycol-AGEs can induce apoptotic death in pericytes (Okamoto et al. (2002) FASEB J. 16(14):1928-30). The induction of apoptosis is mediated through RAGE. The apoptosis of pericytes can relive restriction on pericyte growth, contributing to stimulation of angiogenesis. Additionally, AGE stimulates VEGF production in pericytes and ECs. The upregulation of VEGF by AGE involves transcriptional activation of NF-κB and AP-1 transcription factors, both sensitive to the redox state of the cell. Increased VEGF in vascular wall cells also participates in stimulation of angiogenesis.

[0503] 6. RAGE Isoforms and Angiogenesis

[0504] Modulation of angiogenesis can be used to treat diseases and conditions in which angiogenesis plays a role. For example, angiogenesis inhibitors can function by targeting the critical molecular pathways involved in EC proliferation, migration, and/or survival, many of which are unique to the activated endothelium in tumors. Inhibition of growth factor and adhesion-dependent signaling pathways can induce EC apoptosis with concomitant inhibition of tumor growth. ECs comprising the tumor vasculature are genetically stable and do not share genetic changes with tumor cells; the EC apoptosis pathways are therefore intact. Each EC of a tumor vessel helps provide nourishment to many tumor cells, and although tumor angiogenesis can be driven by a number of exogenous proangiogenic stimuli, experimental data indicate that blockade of a single growth factor (e.g., VEGF) can inhibit tumor-induced vascular growth. Because tumor blood vessels are distinct from normal ones, they may be selectively destroyed without affecting normal vessels. Additionally, reduction of AGEs and/or reduction of the effects of AGEs can inhibit or reduce angiogenesis. Agents which reduce the circulating levels of AGE molecules subjects can have a therapeutic effect. For example, reduction of AGEs can be used to treat diabetic subjects and patients who have angiogenic and vascular conditions.

[0505] Because cell surface receptors such as RAGE are involved in the regulation of angiogenesis, they can be therapeutic targets for treatment of diseases and conditions involving angiogenesis. Provided herein are RAGE isoforms that can modulate one or more steps in the angiogenic process. Exemplary steps in the angiogenesis pathway that are targets for RAGE isoforms are shown in FIG. 1. RAGE isoforms can be administered singly, in parallel or in other combinations. These isoforms can reduce or inhibit the level of circulating AGEs and/or reduce the effects of circulating AGEs in angiogenesis. RAGE isoforms can “scavenge” the circulating AGEs, thus preventing them from stimulating RAGE. RAGE isoforms also can act as negatively acting ligand that interacts with and/or inactivates the RAGE receptor, preventing circulating AGEs from stimulating the receptor and thereby inducing angiogenesis.

L. Exemplary Treatments with RAGE Isoforms

[0506] Provided herein are methods of treatment with RAGE isoforms for diseases and conditions. RAGE isoforms can be used in the treatment of a variety of diseases and conditions, including those described herein. Treatment can be effected by administering by suitable route formulations of the polypeptides, which can be provided in compositions as polypeptides and can be linked to targeting agents, for targeted delivery or encapsulated in delivery vehicles, such as liposomes. Alternatively, nucleic acids encoding the polypeptides can be administered as naked nucleic acids or in vectors, particularly gene therapy vectors. Such gene therapy can be effected ex vivo by removing cells from a subject, introducing the vector or nucleic acid into the cells and then reintroducing the modified cells. Gene therapy also can be effect in vivo by directly administering the nucleic acid or vector.

[0507] Treatments using the RAGE isoforms provided herein, include, but are not limited to treatment of diabetes-related diseases and conditions including periodontal, autoimmune, vascular, and tubulointerstitial diseases. Treatments using the RAGE isoforms also include treatment of ocular disease including macular degeneration, cardiovascular disease, neurodegenerative disease including Alzheimer's disease, inflammatory diseases and conditions including rhematoid arthritis, and diseases and conditions associated with cell proliferation including cancers. Exemplary treatments and preclinical studies are described for treatments and therapies with RAGE isoforms. Such descriptions are meant to be exemplary only and are not limited to a particular RAGE isoform. One of skill in the art can assess based on the type of disease to be treated, the severity and course of the disease, whether the molecule is administered for preventive or therapeutic purposes, previous therapy, the patient's or subject's clinical history and response to therapy, and the discretion of the attending physician appropriate dosage of a molecule to administer.

[0508] 1. Age-Related Macular Degeneration

[0509] RAGE isoforms including, but not limited to, RAGE isoforms described herein such as polypeptides that contain sequences of amino acids set forth in any of SEQ ID NOS: 10-14, can be used in treatment of ocular diseases and conditions, including age-related macular degeneration. Age-related macular degeneration is associated with vision loss resulting from accumulated macular drusen, extracellular deposits in Brusch's membrane, and retinal pigment epithelium (RPE) dysfunction due to degenerative cellular and molecular changes in RPE and photoreceptors overlying the macular drusen. The cellular and molecular changes occurring in the RPE, in part due to oxidative stress in the aging eye, include altered expression of genes for cytokines, matrix organization, cell adhesion, and apoptosis resulting in the possible induction of a focal inflammatory response at the RPE-Bruch's membrane border. For example, oxidative stress induces the accumulation of RAGE ligands in the RPE and photoreceptor layers in early age-related macular degeneration. The accumulated RAGE ligands stimulate RAGE-expressing RPE cells to induce a variety of inflammatory events including NFκB nuclear localization, apoptosis, and most importantly the upregulation of the RAGE receptor itself initiating a positive feedback loop sustained by continued ligand availability. The chronic activation induced by the ligand/RAGE-mediated signaling contributes to disease progression in age-related macular degeneration. Treatment of early stage age-related macular generation with RAGE isoforms, including one or more of the isoforms set forth as SEQ ID NOS: 10-14 can ameliorate one or more symptoms of the disease.

[0510] 2. Diabetes Related Diseases

[0511] RAGE isoforms including, but not limited to RAGE isoforms described herein such as polypeptides that contain sequences of amino acids set forth in any of SEQ ID NOS: 10-14, can be used to treat diabetes-related disease conditions such as vascular disease, periodontal disease, and autoimmune disease. Diabetes can occur by two main forms: type 1 diabetes is characterized by a progressive destruction of pancreatic β-islet cells which results in insulin deficiency; type 2 diabetes is characterized by an increased resistance and/or deficient secretion of insulin leading to hyperglycemia. Complications which result from hyperglycemia, such as myocardial infarction, stroke, and amputation of digits or limbs, can result in morbidity and mortality. Hyperglycemia results in sustained accumulation of RAGE ligands and signaling of RAGE by its ligands contributes to enhanced expression of the RAGE receptor in the diabetic tissue and chronic ligand-mediated RAGE signaling.

[0512] a. Vascular Disease

[0513] RAGE isoforms can be used to treat diabetes-related vascular disease, including both macrovascular and microvascular disease. Hyperglycemia occurring in type 2 diabetes results in chronic vascular injury characterized by a variety of macrovascular perturbations including the development of atherosclerotic plaques, enhanced proliferation of vascular smooth muscle, production of extracellular matrix, and vascular inflammation. Vascular inflammation can be caused and exacerbated by engagement of RAGE by its ligands leading to chronic vascular inflammation, accelerated atherosclerosis, and exaggerated restenosis after revascularization procedures. RAGE isoforms can be employed to block the ligation of RAGE by its ligands to suppress the vascular complications of diabetes. For example, in animal models of diabetes-associated hyperpermeability, treatment of animals with soluble RAGE isoform can lead to near normalization of tissue permeability. In another example of diabetes-related vascular disease, animal models of hyperlipidemia, such as ApoE −/− mice or LDL receptor −/− mice, that have been induced to develop diabetes, display increased accumulation of RAGE ligands and enhanced expression of RAGE. Treatment of diabetic mice with a soluble RAGE isoform can diminish diabetes-related atherogenesis as evidenced by reduced atherosclerotic lesion-area size and decreased levels of tissue factor, VCAM-1, and NFκB compared with vehicle-treated mice. Treatment with RAGE isoforms to block diabetic atherosclerosis can be given any time during disease progression including after establishment of atherosclerotic plaques.

[0514] Diabetes-related vascular disease also can manifest in the microvasculature affecting the eyes, kidney, and peripheral nerves. Importantly, renal disease accounts for the largest percentage of mortality of any diabetes-specific complication. RAGE isoforms can be used to treat diabetes-related vascular disease, including kidney disease. For example, in a mouse model of diabetes, insulin-resistant db/db mouse, RAGE is upregulated in the glomerulus of the kidney particularly in the podocyte cells and likewise, RAGE-ligand expressing mononuclear phagocytes also are accumulated in the glomerulus. Treatment of db/db mice with a soluble RAGE isoform blocks VEGF expression, a factor known to mediate hyperpermeability and recruitment of mononuclear phagocytes into the glomerulus. Further treatment with RAGE isoforms also decrease glomerular and mesangial expansion and decrease the albumin excretion rate.

[0515] RAGE isoforms also can be used to treat diabetes-related vascular disease associated with wound healing. Chronic wound healing is often associated with diabetes and can lead to complications such as infection and amputation. Using the db/db mouse model of type 2 diabetes, a wound healing model can be established by performing full-thickness excisional wounds to generate chronic ulcers. In such a model, the levels of RAGE and its ligands are enhanced. Treatment of mice with a soluble RAGE isoform can increase wound closure by suppressing levels of cytokines including IL-6, TNF-α, and MMP-2,3, and 9. This reduction in cytokine levels contributes to reduced chronic inflammation and ultimately enhances the generation of a thick, well-vascularized granulation tissue and increased levels of VEGF and PDGF-B.

[0516] b. Periodontal Disease

[0517] RAGE isoforms, such as polypeptides that contain sequences of amino acids set forth in any of SEQ ID Nos. 10-14, can be used to treat diabetes-related periodontal disease. Diabetes is a risk factor for the development of periodontal disease due to multiple factors including, for example, impaired host defenses upon invasion of bacterial pathogens, and exaggerated inflammatory responses once infection is established. An inappropriate immune response can lead to alveolar bone loss characteristic of periodontal disease by multiple mechanisms including, for example, impaired recruitment and function of neutrophils after infection by pathogenic bacteria, diminished generation of collagen and exaggerated collagenolytic activity, genetic predisposition, and mechanisms that lead to an enhanced inflammatory response such as, for example, sustained signaling by RAGE. RAGE and its ligands are accumulated in multiple cell types in the diabetic gingiva in patients and subjects with gingivitis-periodontitis including the endothelium and infiltrating mononuclear phagocytes. A diabetic mouse model using streptozotocin to induce diabetes, followed by inoculation of mice with the human periodonatal pathogen Porphyromonas gingivalis, can be used as a model of periodonatal disease. Mice treated with a RAGE isoform, such as by once daily intraperitoneal injections immediately following inoculation with P. gingivalis for 2 months, can be observed for periodontal disease by assessing the degree of alveolar bone loss. Reduction of cytokines and matrix metalloproteinases, such as IL-6, TNF-α, MMP-2,3,9, which are implicated in the destruction on non-mineralized connective tissue and bone, also can be observed following treatment with a RAGE isoform compared to a vehicle control.]

[0518] c. Endometriosis

[0519] Rage isoforms provided herein can be employed for treatment of endometriosis which involves angiogenesis and neovascularization.

[0520] 3. Autoimmune Disease

[0521] Type I diabetes is an autoimmune disease characterized by destruction of β-islet cells, the cells that produce insulin. Type I diabetes develops when the immune system recognizes proteins on the surface of β-cells and is characterized by an inflammatory process known as insulitis where immune cells migrate into and form clusters around the pancreatic islets. Proteins, such as for example RAGE and other inflammatory mediators, contribute to the development of autoimmunity characteristic of diabetes. Mouse models of autoimmune diabetes can be developed by transfer of T lymphocytes from diabetic mice to näive mice on a NOD/SCID genetic background (i.e. devoid of T lymphocytes) or by transfer of syngenic islet cells onto a diabetic, immune-competent NOD host. Treatment of autoimmune diabetic mice with RAGE isoforms including, but not limited RAGE isoforms described herein such as polypeptides that contain sequences of amino acids set forth in any of SEQ ID NOS: 10-14, can reduce the development of insulitis by regulating the differentiation of T cells in response to antigen stimulation. Specifically treatment with RAGE isoforms can decrease, for example, the expression of inflammatory cytokines thought to be directly involved in β-cell destruction, such as TNF-α and IL-1β, and can increase other immunoregulatory cytokines, such as IL-10 and TGF-β.

[0522] Other autoimmune diseases amenable to treatment with RAGE isoforms include multiple sclerosis. Multiple sclerosis is a neuroinflammatory disorder of the central nervous system (CNS) in which T cells that are reactive with major components of myelin sheaths have a central role. Experimental autoimmune encephalomyelitis (EAE) is a related animal model of multiple sclerosis. Blockade of RAGE by treatment with RAGE isoforms including, but not limited to RAGE isoforms described herein such as SEQ ID NOS: 10-14, can suppress EAE when disease is induced by myelin basic protein (MBP) peptide or encephalitogenic T cells, or when EAE occurs spontaneously in T-cell receptor (TCR)-transgenic mice devoid of endogenous TCR-alpha and TCR-beta chains. Treatment with RAGE isoforms also can decrease infiltration of the CNS by immune and inflammatory cells.

[0523] 4. Neurodegenerative Disease

[0524] RAGE isoforms including, but not limited to, RAGE isoforms described herein such as polypeptides that include the sequence of amino acids set forth in any of SEQ ID NOS: 10-14, can be used in treatment of amyloid diseases, including Alzheimer's disease and related conditions. Alzheimer's disease (AD) is characterized by excessive inflammation and the accumulation of inflammatory proteins in AD brains leading to neurodegeneration and dementia associated with AD. The inflammation is caused by innate immune responses from microglia and astrocytes, resident macrophages of the central nervous system, to aggregated β-amyloid (Aβ) forming senile plaques. The mechanism for Aβ-induced inflammation is due to RAGE signaling as Aβ and other RAGE ligands are accumulated in the AD brain. Treatment with RAGE isoforms can reduce the inflammation associated with AD by acting as antagonists of RAGE/RAGE ligand signaling.

[0525] Other neurodegenerative diseases, such as Creutzfeldt-Jakob disease and Huntington's disease, can be treated with RAGE isoforms. RAGE and its ligands are accumulated in prion protein plaques in Creutzfeldt-Jakob disease and in the caudate nucleus in Huntington's disease. Treatment of neurodegenerative diseases with RAGE isoforms can limit inflammation and disease associated with sustained RAGE signaling.

[0526] 5. Cardiovascular Disease

[0527] RAGE isoforms including, but not limited to, RAGE isoforms described herein such as polypeptides that contain sequences of amino acids set forth in any of SEQ ID NOS: 10-14, can be used in treatment of cardiovascular disease. RAGE and its ligands accumulate in ageing tissues including in the ageing human heart leading to sustained and chronic RAGE-mediated signaling. For example, RAGE signaling can mediate regulation of cell-matrix interactions through the activation of matrix metalloproteinases that has been observed, for example, in cardiac fibroblasts associated with cardiac fibrosis. Conversely, decreased levels of a soluble RAGE isoform in the plasma of patients or subjects with coronary artery disease, but not in control subjects, correlates with prognosis of atherosclerosis and vascular inflammation associated with coronary artery disease. Treatment of patients or subjects with cardiovascular disease and related conditions with RAGE isoforms may exert antiatherogenic effects by preventing ligand-mediated RAGE-dependent cellular activation.

[0528] 6. Kidney Disease

[0529] RAGE isoforms including, but not limited to, RAGE isoforms described herein such as polypeptides that contain sequences of amino acids set forth in any of SEQ ID NOS: 10-14, can be used in treatment of chronic kidney disease. Kidney disease is characterized by chronic inflammation and elevated blood levels of proinflammatory cytokines such as TNF-α, IL-1β, and AGE, a ligand for RAGE. RAGE also is accumulated on peripheral blood monocytes from patients and subjects with chronic kidney disease, increasing as renal function deteriorates. RAGE/RAGE ligand signaling is associated with the chronic monocyte-mediated systemic inflammation associated with chronic kidney disease. Treatment with RAGE isoforms can diminish binding of RAGE ligands to cell surface RAGE and attenuate RAGE-mediated signaling such as the production of proinflammatory cytokines like TNF-α.

[0530] 7. Arthritis

[0531] RAGE isoforms including, but not limited to, RAGE isoforms described herein such as polypeptides that contain sequences of amino acids set forth in any of SEQ ID NOS: 10-14, can be used in treatment of arthritis and related conditions. RAGE ligands, such as AGE, are accumulated in the synovial tissues of patients and subjects with rheumatoid and osteoarthritic arthritis. Further, RAGE also is found in the synovial tissue and on a variety of cell types, including macrophages and T cells, of patients and subjects with arthritis. Treatment of subjects, including human patients, with RAGE isoforms can diminish the accelerated inflammation associated with arthritis contributed to by RAGE ligand accumulation and sustained and chronic RAGE signaling.

[0532] 8. Cancer

[0533] RAGE isoforms including, but not limited to, RAGE isoforms described herein, such as polypeptides that contain sequences of amino acids set forth in any of SEQ ID NOS: 10-14, can be used in treatment of cell proliferation diseases including cancers. RAGE signaling contributes to cancer progression by affecting cellular processes such as cell adhesion, cell motility, and the production of matrix proteinases associated with tumor proliferation and invasion. Examples of cancers to be treated herein include, but are not limited to, carcinoma, lymphoma, blastoma, sarcoma, and leukemia or lymphoid malignancies. Additional examples of such cancers include squamous cell cancer (e.g. epithelial squamous cell cancer), lung cancer including small-cell lung cancer, non-small cell lung cancer, adenocarcinoma of the lung and squamous carcinoma of the lung, cancer of the peritoneum, hepatocellular cancer, gastric or stomach cancer including gastrointestinal cancer, pancreatic cancer, glioblastoma, cervical cancer, ovarian cancer, liver cancer, bladder cancer, hepatoma, breast cancer, colon cancer, rectal cancer, colorectal cancer, endometrial or uterine carcinoma, salivary gland carcinoma, kidney or renal cancer, prostate cancer, vulval cancer, thyroid cancer, hepatic carcinoma, anal carcinoma, penile carcinoma, as well as head and neck cancer. Cancers treatable with RAGE isoforms are generally cancers expressing RAGE receptor. Such cancers can be identified by any means known in the art for detecting RAGE expression, for example by RT-PCR or by immunohistochemistry. Treatment of cancer with RAGE isoforms can suppress tumor growth and metastases. For example, an animal model of tumor cell formation can be produced by injecting C6 glioma cells into immunocompromised athymic nude mice. Administration of RAGE isoforms for example, once daily, to the immunocompromised mice can decrease tumor volume and decrease cellular proliferation at the tumor site. In another model termed the Lewis lung carcinoma model, whereby distant metastases flourish upon removal of the primary tumor, administration of RAGE isoforms just before and just after resection of primary tumors resulting from inoculation with wild-type Lewis lung carcinoma cells results in a decrease in the number of lung surface metastases.

[0534] 9. Combination Therapies

[0535] RAGE isoforms, including those provided herein, such as but not limited to the RAGE isoforms (and encoding nucleic acids) set forth in SEQ ID NOS: 5-9 or 10-14 can be used in combination with each other, with other cell surface receptor isoforms, such as a herstatin or any described, for example, in U.S. application Ser. Nos. 09/942,959, 09/234,208, 09/506,079; U.S. Provisional Application Ser. Nos. 60/571,289, 60/580,990 and 60/666,825; and U.S. Pat. No. 6,414,130, published International PCT application No WO 00/44403, WO 1/61356, WO 2005/016966, including but not limited, those set forth in SEQ ID Nos.27-92, 104-163, 222-291 and 306-318); and/or with other existing drugs and therapeutics to treat diseases and conditions, particularly those involving aberrant angiogenesis and/or neovascularization, including, but not limited to, cancers and other proliferative disorders, inflammatory diseases, autoimmune disorders, as set forth herein and known to those of skill in the art.

[0536] For example, a RAGE isoform can be administered with an agent for treatment of diabetes. Such agents include agents for the treatment of any or all conditions such as diabetic periodontal disease, diabetic vascular disease, tubulointerstitial disease and diabetic neuropathy. In another example, a RAGE isoform is administered with an agent that treats cancers including squamous cell cancer (e.g. epithelial squamous cell cancer), lung cancer including small-cell lung cancer, non-small cell lung cancer, adenocarcinoma of the lung and squamous carcinoma of the lung, cancer of the peritoneum, hepatocellular cancer, gastric or stomach cancer including gastrointestinal cancer, pancreatic cancer, glioblastoma, cervical cancer, ovarian cancer, liver cancer, bladder cancer, hepatoma, breast cancer, colon cancer, rectal cancer, colorectal cancer, endometrial or uterine carcinoma, salivary gland carcinoma, kidney or renal cancer, prostate cancer, vulval cancer, thyroid cancer, hepatic carcinoma, anal carcinoma, penile carcinoma, as well as head and neck cancer. A RAGE isoform can be administered in combination with an agent that inhibits AGE formation and/or AGE accumulation. For example, a RAGE isoform is administered with a thiazolidine derivative, aminoguanidine or an AGE cross-link breaker such as Alagebrium (3-phenacyl-4,5-dimethylthiazolium chloride, ALT-711). A RAGE isoform can be administered in combination with two or more agents for treatment of a disease or a condition. For example, for treatment of diabetic neuropathy, a RAGE isoform is administered with two or more of a glycation inhibitor, an inhibitor of rennin angiotensis system, antioxidants, a protein kinase C inhibitor and an inhibitor of secretion and action of prosclerotic cytokines such as TGF-β.

[0537] Adjuvants and other immune modulators can be used in combination with RAGE isoforms in treating cancers, for example to increase immune response to tumor cells. Combination therapy can increase the effectiveness of treatments and in some cases, create synergistic effects such the combination is more effective than the additive effect of the treatments separately. Examples of adjuvants include, but are not limited to, bacterial DNA, nucleic acid fraction of attenuated mycobacterial cells (BCG; Bacillus-Calmette-Guerin), synthetic oligonucleotides from the BCG genome, and synthetic oligonucleotides containing CpG motifs (CpG ODN; Wooldridge et al. (1997) Blood 89:2994-2998), levamisole, aluminum hydroxide (alum), BCG, Incomplete Freud's Adjuvant (IFA), QS-21 (a plant derived immunostimulant), keyhole limpet hemocyanin (KLH), and dinitrophenyl (DNP). Examples of immune modulators include but are not limited to, cytokines such as interleukins (e.g., IL-2, IL-3, IL-4, IL-5, IL-6, IL-7, IL-9, IL-10, IL-11, IL-12, IL-13, IL-15, IL-16, IL-17, IL-18, IL-1α, IL-1β, and IL-1 RA), granulocyte colony stimulating factor (G-CSF), granulocyte-macrophage colony stimulating factor (GM-CSF), oncostatin M, erythropoietin, leukemia inhibitory factor (LIF), interferons, B7.1 (also known as CD80), B7.2 (also known as B70, CD86), TNF family members (TNF-α, TNF-β, LT-β, CD40 ligand, Fas ligand, CD27 ligand, CD30 ligand, 4-1BBL, Trail), and MIF, interferon, cytokines such as IL-2 and IL-12; and chemotherapy agents such as methotrexate and chlorambucil.

[0538] Combinations of RAGE isoforms with intron fusion proteins and other agents, including cell surface receptor (CSR) polypeptide isoforms for treating cancers and other disorders involving aberrant angiogenesis (see, e.g. FIG. 1 outlining targets in the angiogenesis and neovascularization pathway for such polypeptides and those described herein and in the above-noted copending and published applications U.S. application Ser. Nos. 09/942,959, 09/234,208, 09/506,079; U.S. Provisional Application Ser. Nos. 60/571,289, 60/580,990 and 60/666,825; and U.S. Pat. No. 6,414,130, published International PCT application No WO 00/44403, WO 1/61356, WO 2005/016966 are provided. The cell surface receptors include receptor tyrosine kinases, such as members of the VEGFR, FGFR, PDGFR (including Rα, Rβ, CSF1R, Kit), Met (including c-Met, c-RON), Tie-2 and EPHA2 families. These also include ERBB2, ERBB3, ERBB4, DDR1, DDR2, EPHA, EPHB, FGFR2, FGFR3, FGFR4, MET, PDGFR, TEK, TIE, KIT, ERBB2, VEGFR1, VEGFR2, VEGFR3, FLT1, FLT3, TNFR1, TNFR2, RON, and CSF1R. Exemplary of such isoforms are the herstatins (see, SEQ ID Nos. 252-265), polypeptides that include the intron portion of a herstatin (see, SEQ ID Nos. 266-291, which set forth the polypeptides and encoding sequences of nucleotides), as well as isoforms set forth in any of SEQ ID Nos. 27-92, 104-163 and 222-251. The combinations of isoforms and/or drug agent and RAGE receptor selected is function of the disease to be treated and is based upon consideration of the target tissues and cells and receptors expressed thereon.

[0539] The combinations can target two or more cell surface receptors or steps in the angiogenic and/or endothelial cell maintenance pathways or can target two or more cell surface receptors or steps in a disease process, such as any which one or both of these pathways are implicated, such as inflammatory diseases, tumors and all other noted herein and known to those of skill in the art. The two or more agents can be administered as a single composition or can be administered as two or more compositions (where there are more than two agents) simultaneously, intermittently or sequentially. They be packaged as a kit that contains two or more compositions separately or as a combined composition and optionally with instructions for administration and/or devices for administration, such as syringes.

[0540] 10. Evaluation of RAGE Isoform Activities

[0541] If needed animal models can be used to evaluate RAGE isoforms that are candidate therapeutics. Parameters that can be assessed include, but are not limited to efficacy and concentration-response, safety, pharmacokinetics, interspecies scaling and tissue distribution. Model animal studies include assays such as described herein as well as those known to one of skill in the art. Animal models can be used to obtain date that then can be extrapolated to human dosages for design of clinical trials and treatments with RAGE isoforms, for example, efficacy and concentration-response can be extrapolated from animal model results.

[0542] The following examples are included for illustrative purposes only and are not intended to limit the scope of the invention.

### M. EXAMPLES

### Example 1

### Method for Cloning RAGE Isoforms

[0543] A. Preparation of Messenger RNA

[0544] mRNA isolated from major human tissue types from healthy or diseased tissues or cell lines were purchased from Clontech (BD Biosciences, Clontech, Palo Alto, Calif.) and Stratagene (La Jolla, Calif.). Equal amounts of mRNA were pooled and used as templates for reverse transcription-based PCR amplification (RT-PCR).

[0545] B. cDNA Synthesis

[0546] mRNA was denatured at 70° C. in the presence of 40% DMSO for 10 min and quenched on ice. First-strand cDNA was synthesized with either 200 ng oligo(dT) or 20 ng random hexamers in a 20-μl reaction containing 10% DMSO, 50 mM Tris-HCl (pH 8.3), 75 mM KCl, 3 mM MgCl₂, 10 mM DTT, 2 mM each dNTP, 5 μg mRNA, and 200 units of Stratascript reverse transcriptase (Stratagene, La Jolla, Calif.). After incubation at 37° C. for 1 h, the cDNA from both reactions were pooled and treated with 10 units of RNase H (Promega, Madison, Wis.).

[0547] C. PCR Amplification

[0548] Gene-specific PCR primers were selected using the Oligo 6.6 software (Molecular Biology Insights, Inc., Cascade, Colo.) and synthesized by Qiagen-Operon (Richmond, Calif.). The forward primers flank the start codon. The reverse primers flank the stop codon or were chosen from regions at least 1.5 kb downstream from the start codon (see Table 6). Each PCR reaction contained 10 ng of reverse-transcribed cDNA, 0.025 U/μl TaqPlus (Stratagene), 0.0035 U/μl PfuTurbo (Stratagene), 0.2 mM dNTP (Amersham, Piscataway, N.J.), and 0.2 μM forward and reverse primers in a total volume of 50 μl. PCR conditions were 35 cycles and 94.5° C. for 45 s, 58° C. for 50 s, and 72° C. for 5 min. The reaction was terminated with an elongation step of 72° C. for 10 min.

TABLE 5
GENEs FOR CLONING RAGE ISOFORMS

| | Catalytic | SEQ ID | | | SEQ ID |
|---|---|---|---|---|---|
| nt ACC. # | Domain | NO: | ORF | pit ACC. # | NO: |
| NM_001136 | | 1 | | NP_001127 | 2 |

[0549] TABLE 6

PRIMERS FOR PCR CLONING.

SEQ
ID

| | | |
|---|---|---|
| NO | Primer | Sequence |

| | | |
|---|---|---|
| 15 | RAGE_Fu | CAG GAC CCT GGA AGG AAG CA |
| 16 | RAGE_F1 | AGG ATG GCA GCC GGA ACA G |
| 17 | RAGE_flR1 | CCC CTC AAG GCC CTC CAG TA |
| 18 | RAGE_Intron3R1 | GGA AGT CAG AGG CCC TCA TGG |
| 19 | RAGE_Intron4R1 | GGG AAA GAG TGG TGA CCT CAG A |
| 20 | RAGE_Intron5R1 | CTT GGG GGG CAC CTT AGG ACT C |
| 21 | RAGE_Intron6R1 | ACT CCC TCT TTC CCT AAG GGT CA |
| 22 | RAGE_Intron7R1 | GTT ATG GTT CAC CCT ACC TCC CA |
| 23 | RAGE_Intron8R1 | ATTT AGC TCA GAG GGA AGA AGG GA |

[0550] D. Cloning and Sequencing of PCR Products

[0551] PCR products were electrophoresed on a 1% agarose gel, and DNA from detectable bands was stained with Gelstar (BioWhitaker Molecular Application, Walkersville, Md.). The DNA bands were extracted with the QiaQuick gel extraction kit (Qiagen, Valencia, Calif.), ligated into the pDrive UA-cloning vector (Qiagen), and transformed into Escherichia coli. Recombinant plasmids were selected on LB agar plates containing 100 μg/ml carbenicillin. For each transfection, 192 colonies were randomly picked and their cDNA insert sizes were determined by PCR with M13 forward and reverse vector primers. Representative clones from PCR products with distinguishable molecular masses as visualized by fluorescence imaging (Alpha Innotech, San Leandro, Calif.) were then sequenced from both directions with vector primers (M13 forward and reverse). All clones were sequenced entirely using custom primers for directed sequencing completion across gapped regions.

[0552] E. Sequence Analysis

[0553] Computational analysis of alternative splicing was performed by alignment of each cDNA sequence to its respective genomic sequence using SIM4 (a computer program for analysis of splice variants). Only transcripts with canonical (e.g. GT-AG) donor-acceptor splicing sites were considered for analysis. Clones encoding putative RAGE isoforms are studied further (see below, Table 6).

[0554] F. Targeted Cloning

[0555] Computational analysis of public EST databases identified potential splice variants with intron retention or insertion. Cloning of potential splice variants identified by EST database analysis were to be performed by RT-PCR using primers flanking the putative open reading frame as described above.

[0556] G. Exemplary RAGE Isoforms

[0557] Exemplary RAGE isoforms, isolated using the methods described herein are shown below in Table 7. Nucleic acid molecules encoding RAGE isoforms are provided and the sequences thereof are set forth in SEQ ID NOS: 5-9. The sequences of polypeptides of RAGE isoforms are set forth in SEQ ID NOS: 10-14.

TABLE 7
RAGE Isoforms

| ID | Isoform Type | Length | SEQ ID NO |
|---|---|---|---|
| SR021A05 | RAGE | 146 | 10 |
| SR021C02 | RAGE | 266 | 13 |
| SR021C06 | RAGE | 387 | 12 |
| SR021C08 | RAGE | 173 | 14 |
| SR021F06 | RAGE | 172 | 11 |

### Example 2

### RAGE Isoform Expression and Activity Assays

[0558] A. Analysis of mRNA Expression

[0559] Expression of the cloned RAGE isoforms is determined by RT-PCR (or quantitative PCR) in various tissues using the variant-specific primers (such as set forth in Example 1, Table 5).

[0560] Expression of the cloned RAGE isoforms is determined by RT-PCR (or quantitative PCR) in various tissues including: brain, heart, kidney, placenta, prostate, spleen, spinal cord, trachea, testis, uterus, fetal brain, fetal liver, adrenal gland, liver, lung, small intestine, salivary gland, skeletal muscle, thymus, thyroid and a variety of tumor tissues including: breast, colon, kidney, lung, ovary, stomach, uterus, MDA435 and HEPG2. PCR primers (such as set forth in Example 1, Table 5) are selected within the exclusive regions of retained introns or alternative exons, such that only the soluble receptor-specific signals are amplified. Each PCR reaction is performed with 2 cycle numbers (e.g. 32 versus 38 cycles) for the purpose of getting semi-quantitative results. Expression of each cloned CSR isoform is compared to the expression of the corresponding wildtype membrane receptor.

[0561] B. Expression

[0562] Sequence-verified RAGE-IFP encoding cDNA molecules were each subcloned into a replication-deficient recombinant adenoviral vector under control of the CMV promoter, following the manufacturer's instruction (Invitrogen, Cat# K4930-00). The recombinant adenoviruses were produced using 293A cells (Invitrogen). Supernatants from the infected 293 cells were analysed by immunoblotting using an anti-Myc antibody. The results show that the RAGE-IFPs were efficiently expressed and secreted in 293 cells.

[0563] C. Secretion

[0564] RAGE isoforms are analyzed in cultured human cells to assess for secreted isoforms. Splice variant cDNAs encoding candidate RAGE isoforms are subcloned into a mammalian expression vector, such as the pcDNA3 vector (Invitrogen, Carlsbad, Calif.) with a myc tag fused at the C-terminus of the proteins to facilitate their detection.

[0565] Human embryonic kidney 293T cells are seeded at 2×10⁶ cells/well in a 6-well plate and maintained in Dulbecco's modified Eagle's medium and 10% fetal bovine serum (Invitrogen). Cells are transfected using LipofectAMINE 2000 (Invitrogen) following the manufacturer's instructions. On the day of transfection, 5 μg plasmid DNA is mixed with 15 μl of LipofectAMINE 2000 in 0.5 ml of the serum-free DMEM. The mixture is incubated for 20 minutes at room temperature before it is added to the cells. Cells are incubated at 37° C. in a CO₂ incubator for 48 hours. To study the transgene expression of the secreted RAGE isoforms, the supernatants are collected and the cells lysed in PBS buffer containing 0.2% of Triton X-100. Both the cell lysates and the supernatants are assayed for the transgene expression. Purified His6-tagged proteins are eluted and separated on SDS-polyacrylamide gels for immunoblotting using anti-Myc antibodies (both from Invitrogen). Antibodies are diluted 1:5000. Expression of the secreted RAGE isoforms is detected in cell lysates and conditioned media by Western blot using an anti-Myc antibody.

[0566] D. Receptor Binding

[0567] Co-immunoprecipitation assays were performed to show binding of RAGE isoforms and secreted RAGE isoforms to their respective membrane anchored full-length receptors (see, for example, Jin et al. J Biol Chem 2004, 279:1408 and Jin et al. J Biol Chem 2004, 279:14179). Human embryo kidney 293T cells are transiently transfected with the recombinant pcDNA 3.1 (MycHis) plasmid expressing soluble RAGE (as described above). Forty-eight hours after transfection, conditioned medium is collected and binding of RAGE ligand is assessed. Conditioned medium (100 μl) from transfected 293T cells is incubated with RAGE ligand (100 ng) in the presence or absence of 2 μg of soluble RAGE-Fc (R&D Systems) for one hour. Protein complexes are immunoprecipitated with 0.2 μg/reaction of anti-RAGE ligand antibodies (R&D Systems) and separated on a denaturing protein gel probed with anti-Myc antibody. The Western blot shows protein binding between sRAGE-Myc and RAGE ligand.

[0568] E. Proliferation Assays

[0569] Modulation of cell proliferation by RAGE isoforms can be assessed in cells transformed with a RAGE isoform. Cells, seeded at a predetermined density, such as ECV304 cells, are transformed with a RAGE cDNA or control (such as a wildtype/predominant form of RAGE and/or vector alone). After an incubation and attachment period, ligand is added and the cells are incubated again. Cell proliferation can then be assessed, for example using a 3-(4,5-dimethylthiazol-2-yl)-2,5 diphenyl-2H-tetrazolium bromide (MTT) method. (see Yonekura et al. 2003 Biochem J. 370:1097-1109).

[0570] F. Complexation

[0571] RAGE isoforms can be assayed for their ability to complex with other proteins. In one example, a RAGE isoform can be assessed for complexation with LF-L (lactoferrin-like AGE binding protein) using a ligand blotting assay (see e.g., Schmidt et al. 1994 J. Biol. Chem. 269: 9882-88). LF-L radiolabeled with ¹²⁵I (¹²⁵I-LF-L) is incubated with RAGE protein (isoform and/or wildtype form) immobilized on a solid support After washing, the amount of ¹²⁵I-LF-L associated with a RAGE isoform can be quantified.

[0572] Complexation also can be assessed in a competitive assay. RAGE is adsorbed onto polypropylene tubes such that it remains tightly bound to the tubes (see Schmidt et al. 1994 J. Biol. Chem. 269: 9882-88). ¹²⁵I-LF-L is added to the tubes alone or after preincubation with a RAGE isoform. After an incubation period, the tubes are washed and the amount of ¹²⁵I-LF-L binding is assessed by measuring the radioactivity associated with each tube. A comparison of the samples that were preincubated with a RAGE isoform versus no preincubation indicates whether the RAGE isoform competes effectively for binding to LF-L.

[0573] G. ERK Phosphorylation Assays

[0574] RAGE isoforms can be assessed for their ability to stimulate ERK phosphorylation. Endothelial cells (human microvascular EC cells) expressing RAGE or a RAGE isoform are incubated in serum-free media and then AGEs are added for an incubation period. After washing, cells are solubilized and extracts subject to SDS-PAGE. Proteins are transferred to a membrane and the amount of phosphorylated ERK is assessed by immunoreactivity with an ant-phosphoERK antibody.

[0575] H. Cell Migration Assay

[0576] RAGE isoform effects on cell migration can be assessed. Cells, such as ECV304 cells, are stably transformed with a RAGE isoform cDNA or control (e.g. a wildtype/predominant form of RAGE and/or vector alone). The stably transformed cells are seeded onto plates and grown to confluence. Cells are wounded by denuding a strip of the monolayer of cells. After washing in serum free media, the cells are incubated with media containing serum and type I collagen. Cell cultures are photographed over time to monitor the rate of wound closure (i.e. cell migration into the wounded strip area).

[0577] I. Neurite Outgrowth

[0578] RAGE-mediated affects on neurite outgrowth can be assessed for a RAGE isoform by stably transforming a neuroblastoma cell line with a RAGE cDNA or control. The cells are serum starved and grown overnight on amphoterin coated glass slides. Filamentous actin is stained, for example using TRITC-phalloidin and the percentage of cells bearing neuritis is assessed and compared between samples. Cells also can be stained with an antibody against RAGE (or against a tag if tagged-RAGE is expressed, e.g. a myc tag) to assess the proportion of cells expressing a RAGE isoform that formed neurite outgrowths (see for example, Huttunen et al. 1999 J. Biol. Chem. 274:19919-24).

### Example 3

### Preparation and Expression of RAGE Intron Fusion Protein Construct in Human Cells

[0579] A. Generation of tPA cDNA

[0580] In order to obtain human tissue plasminogen activator (tPA) cDNA, PCR primers specific for the 5′ portion of the human tissue plasminogen activator (tPA) including the tPA signal/pro sequence (based on the human tPA cDNA sequence as set forth in SEQ ID NO: 327) were selected based on the published information (Kohne et al. (1999) J Cellular Biochem 75:446-461) and synthesized by Qiagen-Operon (Richmond, Calif.). The sequences of the primers are set forth in SEQ ID NO: 349 and SEQ ID NO: 350 (see Table 9.) Each PCR reaction contained 10 ng of reverse transcribed cDNA, 0.025 U/μl TaqPlus (Stratagene), 0.0035 U/μl PfuTurbo (Stratagene), 0.2 mM dNTP (Amersham, Piscataway, N.J.), and 0.2 μM forward and reverse primers in a total volume of 50 μl. PCR conditions were 35 cycles at 94.5° C. for 45 s, 58° C. for 50 s, and 72° C. for 5 min. The reaction was terminated with an elongation step of 72° C. for 10 min. PCR products were electrophoresed on a 1% agarose gel, and DNA from detectable bands was stained with Gelstar (BioWhitaker Molecular Application, Walkersville, Md.). The DNA bands were extracted with the QiaQuick gel extraction kit (Qiagen, Valencia, Calif.), ligated into the pDrive UA-cloning vector (SEQ ID NO:351, Qiagen), and transformed into Escherichia coli for purification of the pDrive-tPA vector.

[0581] B. PCR Amplification and Expression Cloning of the tPA Signal/Pro Sequence

[0582] In order to clone the portion of the nucleic acid that includes the nucleotides encoding the tPA signal/pro sequence (see Table 8) as set forth in SEQ ID NO: 328, PCR was performed using the primers as forth in SEQ ID NO. 352 and SEQ ID NO. 353 (see Table 9). The primers were generated to contain restriction enzyme cleavage sites for NheI and XhoI, as well as a myc-tag, to facilitate cloning of the amplified product into the pCI expression plasmid (SEQ ID NO: 354, Promega). The PCR reaction was performed as above with 10 ng pDrive-tPA. The PCR conditions included 35 cycles at 94.5° C. for 45 s, 58° C. for 50 s, and 72° C. for 5 min. The reaction was terminated with an elongation step of 72° C. for 10 min. The tPA encoded cDNA was digested with NheI and XhoI to generate the tPA signal/pro sequence fragment and subcloned into the pCI expression plasmid (Promega) at the NheI and XhoI sites to form the pCI-tPA:myc vector.

TABLE 8
LIST OF GENES FOR CLONING tPA-intron
fusion protein CONSTRUCTs

| | | SEQ ID | | | SEQ ID |
|---|---|---|---|---|---|
| nt ACC. # | Description | NO: | ORF | prt ACC. # | NO: |
| NM_000930 | tPA | 327 | | NP_000921 | 326 |
| | tPA pre/pro | 329 | | | 328 |
| | sequence | | | | |

[0583] C. Cloning of Intron Fusion Proteins into the pCI-tPA Vector

[0584] Intron fusion proteins were PCR amplified from their pDrive sequencing vector, respectively, and subsequently cloned into the pCI-tPA:myc vector. For the PCR amplification, the forward primers contain an XhoI site, and the reverse primers contain a NotI site. The RAGE intron fusion protein without a signal sequence (see e.g., 13) was PCR amplified using primers set forth in SEQ ID NOS:355 and 356. Each PCR reaction contained 10 ng of reverse transcribed cDNA, 0.025 U/μl TaqPlus (Stratagene), 0.0035 U/μl PfuTurbo (Stratagene), 0.2 mM dNTP (Amersham, Piscataway, N.J.), and 0.2 μM forward and reverse primers in a total volume of 50 μl. PCR conditions were 25 cycles and 94.5° C. for 45 s, 58° C. for 50 s, and 72° C. for 5 min. The reaction was terminated with an elongation step of 72° C. for 10 min. PCR products were electrophoresed on a 1% agarose gel, and DNA from detectable bands was stained with Gelstar (BioWhitaker Molecular Application, Walkersville, Md.). The DNA bands were extracted with the QiaQuick gel extraction kit (Qiagen, Valencia, Calif.), subcloned into the pCI-tPA:myc vector at the XhoI and NotI sites downstream of the tPA/pro sequence to generate tPA:myc-intron fusion protein constructs as set forth in SEQ ID NOs. 340 (nucleotide) and 341 (amino acid). An exemplary tPA-intron fusion protein of a RAGE isoform is set forth in Table 10.

TABLE 9

PRIMERS FOR PCR CLONING.

SEQ
ID

| | | | |
|---|---|---|---|
| NO | Primer | ID | Sequence |

| | | | |
|---|---|---|---|
| 349 | tPA_F | | CTCTGCGAGGAAAGGGAAGGA |
| 350 | tPA_R | | CGTGCCCCTGTAGCTGATGCC |
| 352 | tPApre/pro_F1 | | ATTAGCTAGCCACCATGGATGCAA |
| | | | TGAAGAGAGGGATTACTCGAGCAG |
| | | | ATCCTCTTGTGAGATGAGTTTTTG |
| | | | TTCTG |
| 353 | tPApre/pro_R1 | | GCTCCTCTTCGAATCG |
| 355 | RAGEIFP_F | SR021_C02 | AATTCTCGAGCAAAACATCACAGC |
| | | | CCGGA |
| 356 | RAGEIFP_R | SR021_C02 | AATTGAATTCCTAAGGGTCAGACT |
| | | | TCCAGA |

[0585] TABLE 10
tPA-intron fusion protein Fusions

| | | SEQ ID NO | SEQ ID NO |
|---|---|---|---|
| ID | Isoform Type | (nucleotide) | (amino acid) |
| SR021C02 | tPA-myc-RAGE | 340 | 341 |

D. Protein Expression and Secretion

[0586] Medium from cultured human cells was assessed for secretion of each of the tPA-intron fusion proteins. To express the tPA-intron fusion proteins in human cells, human embryonic kidney 293T cells were seeded at 2×10⁶ cells/well in a 6-well plate and maintained in Dulbecco's modified Eagle's medium (DMEM) and 10% fetal bovine serum (Invitrogen). Cells were transfected using LipofectAMINE 2000 (Invitrogen) following the manufacturer's instructions. On the day of transfection, 5 μg plasmid DNA was mixed with 15 μl of LipofectAMINE 2000 in 0.5 ml of serum-free DMEM. The mixture was incubated for 20 minutes at room temperature before it was added to the cells. Cells were incubated at 37° C. in a CO₂ incubator for 48 hours. To study the protein secretion of intron fusion proteins, the conditioned media was collected 48 hours after transfection and expression levels were analyzed by Western blotting. Conditioned media was analyzed by separation on SDS-polyacrylamide gels followed by immunoblotting using an anti-Myc antibody (Invitrogen). Antibodies were diluted 1:5000. To study the cellular protein expression of the intron fusion proteins, after cell culture media was removed, the transfected cells were harvested and lysed in a cell lysis buffer (PBS/0.25% Triton X-100). Lysates were clarified by centrifugation to remove insoluble cell debris. Typically, 10 micrograms of proteins from each samples were separated on SDS-PAGE gels after protein concentrations were determined. Cell lysates were analyzed by Western blotting using an anti-Myc antibody (Invitrogen). Expression and secretion of intron fusion proteins containing a tpA pre/prosequence were compared to intron fusion proteins containing the original or endogenous signal peptide. Comparisons of expression and secretion of an exemplary RAGE isoform intron fusion protein is depicted in Table 11.

TABLE 11
Summary of intron fusion protein
Protein Expression and Secretion

| intron | | Protein | Protein | | |
|---|---|---|---|---|---|
| fusion | | Expression | Secretion | Protein | Protein |
| protein | | w/Original | w/Original | Expression | Secretion |
| ID | Gene | sp | sp | w/tPA sp | w/tPA sp |
| SR021C02 | RAGE | ++ | + | +++ | +++ |

[0587] Since modifications will be apparent to those of skill in this art, it is intended that this invention be limited only by the scope of the appended claims

The application's sequence listing, which the Patent Office published only in electronic form, follows.

SEQUENCE LISTING (367 sequences)

SEQ ID NO: 1 - DNA, 1414 bp, Homo sapiens
gccaggaccctggaaggaagcaggatggcagccggaacagcagttggagcctgggtgctggtcctcagtctgtggggggcagtagtaggtgctcaaaacatcacagcccggattggcgagccactggtgctgaagtgtaagggggcccccaagaaaccaccccagcggctggaatggaaactgaacacaggccggacagaagcttggaaggtcctgtctccccagggaggaggcccctgggacagtgtggctcgtgtccttcccaacggctccctcttccttccggctgtcgggatccaggatgaggggattttccggtgccaggcaatgaacaggaatggaaaggagaccaagtccaactaccgagtccgtgtctaccagattcctgggaagccagaaattgtagattctgcctctgaactcacggctggtgttcccaataaggtggggacatgtgtgtcagagggaagctaccctgcagggactcttagctggcacttggatgggaagcccctggtgcctaatgagaagggagtatctgtgaaggaacagaccaggagacaccctgagacagggctcttcacactgcagtcggagctaatggtgaccccagcccggggaggagatccccgtcccaccttctcctgtagcttcagcccaggccttccccgacaccgggccttgcgcacagcccccatccagccccgtgtctgggagcctgtgcctctggaggaggtccaattggtggtggagccagaaggtggagcagtagctcctggtggaaccgtaaccctgacctgtgaagtccctgcccagccctctcctcaaatccactggatgaaggatggtgtgcccttgccccttccccccagccctgtgctgatcctccctgagatagggcctcaggaccagggaacctacagctgtgtggccacccattccagccacgggccccaggaaagccgtgctgtcagcatcagcatcatcgaaccaggcgaggaggggccaactgcaggctctgtgggaggatcagggctgggaactctagccctggccctggggatcctgggaggcctggggacagccgccctgctcattggggtcatcttgtggcaaaggcggcaacgccgaggagaggagaggaaggccccagaaaaccaggaggaagaggaggagcgtgcagaactgaatcagtcggaggaacctgaggcaggcgagagtagtactggagggccttgaggggcccacagacagatcccatccatcagctcccttttctttttcccttgaactgttctggcctcagaccaactctctcctgtataatctctctcctgtataaccccaccttgccaagctttcttctacaaccagagccccccacaatgatgattaaacacctgacacatcttga

SEQ ID NO: 2 - protein, 404 aa, Homo sapiens
MAAGTAVGAWVLVLSLWGAVVGAQNITARIGEPLVLKCKGAPKKPPQRLEWKLNTGRTEAWKVLSPQGGGPWDSVARVLPNGSLFLPAVGIQDEGIFRCQAMNRNGKETKSNYRVRVYQIPGKPEIVDSASELTAGVPNKVGTCVSEGSYPAGTLSWHLDGKPLVPNEKGVSVKEQTRRHPETGLFTLQSELMVTPARGGDPRPTFSCSFSPGLPRHRALRTAPIQPRVWEPVPLEEVQLVVEPEGGAVAPGGTVTLTCEVPAQPSPQIHWMKDGVPLPLPPSPVLILPEIGPQDQGTYSCVATHSSHGPQESRAVSISIIEPGEEGPTAGSVGGSGLGTLALALGILGGLGTAALLIGVILWQRRQRRGEERKAPENQEEEEERAELNQSEEPEAGESSTGGP

SEQ ID NO: 3 - DNA, 1414 bp, Homo sapiens
  variation 30: n = A,T
  variation 182: n = A,T
  variation 268: n= A, G
  variation 380: n= A, G
  variation 847: n= G, T
  variation 1130: n= G, A
gccaggaccctggaaggaagcaggatggcngccggaacagcagttggagcctgggtgctggtcctcagtctgtggggggcagtagtaggtgctcaaaacatcacagcccggattggcgagccactggtgctgaagtgtaagggggcccccaagaaaccaccccagcggctggaatggaaacngaacacaggccggacagaagcttggaaggtcctgtctccccagggaggaggcccctgggacagtgtggctcgtgtccttcccaacngctccctcttccttccggctgtcgggatccaggatgaggggattttccggtgccaggcaatgaacaggaatggaaaggagaccaagtccaactaccgagtccgtgtctaccngattcctgggaagccagaaattgtagattctgcctctgaactcacggctggtgttcccaataaggtggggacatgtgtgtcagagggaagctaccctgcagggactcttagctggcacttggatgggaagcccctggtgcctaatgagaagggagtatctgtgaaggaacagaccaggagacaccctgagacagggctcttcacactgcagtcggagctaatggtgaccccagcccggggaggagatccccgtcccaccttctcctgtagcttcagcccaggccttccccgacaccgggccttgcgcacagcccccatccagccccgtgtctgggagcctgtgcctctggaggaggtccaattggtggtggagccagaaggtggagcagtagctcctggtggaaccgtaaccctgacctgtgaagtccctgcccagccctctcctcaaatccactggatgaaggatngtgtgcccttgccccttccccccagccctgtgctgatcctccctgagatagggcctcaggaccagggaacctacagctgtgtggccacccattccagccacgggccccaggaaagccgtgctgtcagcatcagcatcatcgaaccaggcgaggaggggccaactgcaggctctgtgggaggatcagggctgggaactctagccctggccctggggatcctgggaggcctggggacagccgccctgctcattggggtcatcttgtggcaaaggcggcaacgccnaggagaggagaggaaggccccagaaaaccaggaggaagaggaggagcgtgcagaactgaatcagtcggaggaacctgaggcaggcgagagtagtactggagggccttgaggggcccacagacagatcccatccatcagctcccttttctttttcccttgaactgttctggcctcagaccaactctctcctgtataatctctctcctgtataaccccaccttgccaagctttcttctacaaccagagccccccacaatgatgattaaacacctgacacatcttga

SEQ ID NO: 4 - protein, 404 aa, Homo sapiens
  VARIANT 77: Xaa = C, R
  VARIANT 82: Xaa = G, S
  VARIANT 305: Xaa = H, Q
  VARIANT 307: Xaa = C, S
  VARIANT 365: Xaa = R, S
  VARIANT 369: Xaa = G, Q, R
MAAGTAVGAWVLVLSLWGAVVGAQNITARIGEPLVLKCKGAPKKPPQRLEWKLNTGRTEAWKVLSPQGGGPWDSVAXVLPNXSLFLPAVGIQDEGIFRCQAMNRNGKETKSNYRVRVYQIPGKPEIVDSASELTAGVPNKVGTCVSEGSYPAGTLSWHLDGKPLVPNEKGVSVKEQTRRHPETGLFTLQSELMVTPARGGDPRPTFSCSFSPGLPRHRALRTAPIQPRVWEPVPLEEVQLVVEPEGGAVAPGGTVTLTCEVPAQPSPQIHWMKDGVPLPLPPSPVLILPEIGPQDQGTYSCVATXSXHGPQESRAVSISIIEPGEEGPTAGSVGGSGLGTLALALGILGGLGTAALLIGVILWQXRQRXGEERKAPENQEEEEERAELNQSEEPEAGESSTGGP

SEQ ID NO: 5 - DNA, 928 bp, Homo sapiens
  SR021A05
caggaccctggaaggaagcaggatggcagccggaacagcagttggagcctgggtgctggtcctcagtctgtggggggcagtagtaggtgctcaaaacatcacagcccggattggcgagccactggtgctgaagtgtaagggggcccccaagaaaccaccccagcggctggaatggaaactgaacacaggccggacagaagcttggaaggtcctgtctccccagggaggaggcccctgggacagtgtggctcgtgtccttcccaacggctccctcttccttccggctgtcgggatccaggatgaggggattttccggtgccaggcaatgaacaggaatggaaaggagaccaagtccaactaccgagtccgtgtctaccgtaagaattccagggtcttctccaaggcctccctcttacctaagaaaaagccttcaaccccagccttggcccatgagggcctctgacttccaatctgaattcgtcgacaagcttctcgagcctaggctagctctagaccacacgtgtgggggcccgagctcgcggccgctgtattctatagtgtcacctaaatggccgcacaattcactggccgtcgttttacaacgtcgtgactgggaaaaccctggcgttacccaacttaatcgccttgcagcacatccccctttcgccagctggcgtaatagcgaagaggcccgcaccgatcgcccttcccaacagttgcgcagcctgaatggcgaatggaaattgtaagcgttaatattttgttaaaattcgcgttaaatttttgttaaatcagctcattttttaaccaataggccgaaatcggcaaaatcccttataaatcaaaagaatagaccgagatagggttgagtgttgttccagtttggaacaagagtccactattaaagaacgtggactccaacgtcaaa

SEQ ID NO: 6 - DNA, 941 bp, Homo sapiens
  SR021F06
aggaccctggaaggaagcaggatggcagccggaacagcagttggagcctgggtgctggtcctcagtctgtggggggcagtagtaggtgctcaaaacatcacagcccggattggcgagccactggtgctgaagtgtaagggggcccccaagaaaccaccccagcggctggaatggaaactgaacacaggccggacagaagcttggaaggtcctgtctccccagggaggaggcccctgggacagtgtggctcgtgtccttcccaacggctccctcttccttccggctgtcgggatccaggatgaggggattttccggtgccaggcaatgaacaggaatggaaaggagaccaagtccaactaccgagtccgtgtctaccagattcctgggaagccagaaattgtagattctgcctctgaactcacggctggtgttcccaataaggtggggacatgtgtgtcagagggaagctaccctgcagggactcttagctggcacttggatgggaagcccctggtgcctaatgagaagggtgagtcctaaggtgccccccaagaatcacgaattctggatccgatacgtaacgcgtctgcagcatgcgtggtaccgagctttccctatagtgagtcgtattagagcttggcgtaatcatggtcatagctgtttcctgtgtgaaattgttatccgctcacaattccacacaacatacgagccggaagcataaagtgtaaagcctggggtgcctaatgagtgagctaactcacattaattgcgttgcgctcactgcccgctttccagtcgggaaacctgtcgtgccagctgcattaatgaatcggccaacgcgcggggagaggcggtttgcgtattgggcgctcttccgcttcctcgctcactgactcgctgcgctcggtcgttcggctgcggcgagcggtatcagctcactc

SEQ ID NO: 7 - DNA, 1165 bp, Homo sapiens
  SR021C06
atggcagccggaacagcagttggagcctgggtgctggtcctcagtctgtggggggcagtagtaggtgctcaaaacatcacagcccggattggcgagccactggtgctgaagtgtaagggggcccccaagaaaccaccccagcggctggaatggaaactgaacacaggccggacagaagcttggaaggtcctgtctccccagggaggaggcccctgggacagtgtggctcgtgtccttcccaacggctccctcttccttccggctgtcgggatccaggatgaggggattttccggtgccaggcaatgaacaggaatggaaaggagaccaagtccaactaccgagtccgtgtctaccagattcctgggaagccagaaattgtagattctgcctctgaactcacggctggtgttcccaataaggtggggacatgtgtgtcggagggaagctaccctgcagggactcttagctggcacttggatgggaagcccctggtgcctaatgagaagggagtatctgtgaaggaacagaccaggagacaccctgagacagggctcttcacactgcagtcggagctaatggtgaccccagcccggggaggagatccccgtcccaccttctcctgtagcttcagcccaggccttccccgacaccgggccttgcgcacagcccccatccagccccgtgtctgggagcctgtgcctctggaggaggtccaattggtggtggagccagaaggtggagcagtagctcctggtggaaccgtaaccctgacctgtgaagtccctgcccagccctctcctcaaatccactggatgaaggatggggtgcccttgccccttccccccagccctgtgctgatcctccctgagatagggcctcaggaccagggaacctacagctgtgtggccacccattccagccacgggccccaggaaagccgtgctgtcagcatcagcatcatcggtgagacctctccccaagccctacagaccctgggactagggtgcaggacagcacaggctctaatttcctgccccattctggccttatccctaacagccaccccacctctccctccatgcacccacacccaagcctcccctgccccacccaaattctgccaagagagcagccaagcctctcccttcttccctctgagctaaa

SEQ ID NO: 8 - DNA, 994 bp, Homo sapiens
  SR021C02
aggaccctggaaggaagcaggatggcagccggaacagcagttggagcctgggtgctggtcctcagtctgtggggggcagtagtaggtgctcaaaacatcacagcccggattggcgagccactggtgctgaagtgtaagggggcccccaagaaaccaccccagcggctggaatggaaactgaacacaggccggacagaagcttggaaggtcctgtctccccagggaggaggcccctgggacagtgtggctcgtgtccttcccaacggctccctcttccttccggctgtcgggatccaggatgaggggattttccggtgccaggcaatgaacaggaatggaaaggagaccaagtccaactaccgagtccgtgtctaccagattcctgggaagccagaaattgtagattctgcctctgaactcacggctggtgttcccaataaggtagtggaagaaagcaggagaagtagaaaacggccctgtgaacaggaggtggggacatgtgtgtcagagggaagctaccctgcagggactcttagctggcacttggatgggaagcccctggtgcctaatgagaagggagtatctgtgaaggaacagaccaggagacaccctgagacagggctcttcacactgcagtcggagctaatggtgaccccagcccggggaggagatccccgtcccaccttctcctgtagcttcagcccaggccttccccgacaccgggccttgcgcacagcccccatccagccccgtgtctggggtgagcataggtggggagggccccaagctcacgtgagcacgttctggaagtctgacccttagggaaagagggagtaatcacgaattctggatccgatacgtaacgcgtctgcagcatgcgtggtaccgagctttccctatagtgagtcgtattagagcttggccgtaatcatggtcatagctgtttcctgtgtgaaattgttatccgctcacaatttcacacacatacgagccg

SEQ ID NO: 9 - DNA, 1415 bp, Homo sapiens
  SR021C08
atggcagccggaacagcagttggagcctgggtgctggtcctcagtctgtggggggcagtagtaggtgctcaaaacatcacagcccggattggcgagccactggtgctgaagtgtaagggggcccccaagaaaccaccccagcggctggaatggaaactgaacacaggccggacagaagcttggaaggtcctgtctccccagggaggaggcccctgggacagtgtggctcgtgtccttcccaacggctccctcttccttccggctgtcgggatccaggatgaggggattttccggtgccaggcaatgaacaggaatggaaaggagaccaagtccaactaccgagtccgtgtctaccagattcctgggaagccagaaattgtagattctgcctctgaactcacggctggtgttcccaataaggtagtggaagaaagcaggagaagtagaaaacggccctgtgaacaggaggcgagtgtgtgtgggtgtgggtgtgtggcatctctcattttcaaaggattctgaggtcaccactctttccccaggtggggacatgtgtgtcagagggaagctaccctgcagggactcttagctggcacttggatgggaagcccctggtgcctaatgagaagggagtatctgtgaaggaacagaccaggagacaccctgagacagggctcttcacactgcagtcggagctaatggtgaccccagcccggggaggagatccccgtcccaccttctcctgtagcttcagcccaggccttccccgacaccgggccttgcgcacagcccccatccagccccgtgtctggggtgagcataggtggggagggccccaagctcacgtgagcacgttctggaagtctgacccttagggaaagagggagtcaagcccatggccactgggatcactcacaagtgtaactctccacctcaaaacccttccaactcccagagcctgtgcctctggaggaggtccaattggtggtggagccagaaggtggagcagtagctcctggtggaaccgtaaccctgacctgtgaagtccctgcccagccctctcctcaaatccactggatgaaggatggtgtgcccttgccccttccccccagccctgtgctgatcctccctgagatagggcctcaggaccagggaacctacagctgtgtggccacccattccagccacgggccccaggaaagccgtgctgtcagcatcagcatcatcgaaccaggcaaggaggggccaactgcaggtgaggggtttgataaagtcagggaagcagaagatagcccccaacacatgtgactggggggatggtcaacaagaaaggaatggaaggccccagaaaaccaggaggaagaggaggagcgtgcagaactgaatcagtcggaggaacctgaggcaggcgagaa

SEQ ID NO: 10 - protein, 146 aa, Homo sapiens
  SR021A05_tr
MAAGTAVGAWVLVLSLWGAVVGAQNITARIGEPLVLKCKGAPKKPPQRLEWKLNTGRTEAWKVLSPQGGGPWDSVARVLPNGSLFLPAVGIQDEGIFRCQAMNRNGKETKSNYRVRVYRKNSRVFSKASLLPKKKPSTPALAHEGL

SEQ ID NO: 11 - protein, 172 aa, Homo sapiens [sequence omitted]

SEQ ID NO: 12 - protein, 387 aa, Homo sapiens
  SR021C06_tr
MAAGTAVGAWVLVLSLWGAVVGAQNITARIGEPLVLKCKGAPKKPPQRLEWKLNTGRTEAWKVLSPQGGGPWDSVARVLPNGSLFLPAVGIQDEGIFRCQAMNRNGKETKSNYRVRVYQIPGKPEIVDSASELTAGVPNKVGTCVSEGSYPAGTLSWHLDGKPLVPNEKGVSVKEQTRRHPETGLFTLQSELMVTPARGGDPRPTFSCSFSPGLPRHRALRTAPIQPRVWEPVPLEEVQLVVEPEGGAVAPGGTVTLTCEVPAQPSPQIHWMKDGVPLPLPPSPVLILPEIGPQDQGTYSCVATHSSHGPQESRAVSISIIGETSPQALQTLGLGCRTAQALISCPILALSLTATPPLPPCTHTQASPAPPKFCQESSQASPFFPLS

SEQ ID NO: 13 - protein, 266 aa, Homo sapiens
  SR021C02_tr
MAAGTAVGAWVLVLSLWGAVVGAQNITARIGEPLVLKCKGAPKKPPQRLEWKLNTGRTEAWKVLSPQGGGPWDSVARVLPNGSLFLPAVGIQDEGIFRCQAMNRNGKETKSNYRVRVYQIPGKPEIVDSASELTAGVPNKVVEESRRSRKRPCEQEVGTCVSEGSYPAGTLSWHLDGKPLVPNEKGVSVKEQTRRHPETGLFTLQSELMVTPARGGDPRPTFSCSFSPGLPRHRALRTAPIQPRVWGEHRWGGPQAHVSTFWKSDP

SEQ ID NO: 14 - protein, 173 aa, Homo sapiens [sequence omitted]

SEQ ID NO: 15 - DNA, 20 bp, Artificial Sequence
  primer RAGE_Fu
caggaccctggaaggaagca

SEQ ID NO: 16 - DNA, 19 bp, Artificial Sequence
  primer RAGE_F1
aggatggcagccggaacag

SEQ ID NO: 17 - DNA, 20 bp, Artificial Sequence
  primer RAGE_f1R1
cccctcaaggccctccagta

SEQ ID NO: 18 - DNA, 21 bp, Artificial Sequence
  primer RAGE_Intron3R1
ggaagtcagaggccctcatgg

SEQ ID NO: 19 - DNA, 22 bp, Artificial Sequence
  primer RAGE_Intron4R1
gggaaagagtggtgacctcaga

SEQ ID NO: 20 - DNA, 22 bp, Artificial Sequence
  primer RAGE_Intron5R1
cttggggggcaccttaggactc

SEQ ID NO: 21 - DNA, 23 bp, Artificial Sequence
  primer RAGE_Intron6R1
actccctctttccctaagggtca

SEQ ID NO: 22 - DNA, 23 bp, Artificial Sequence
  primer RAGE_Intron7R1
gttatggttcaccctacctccca

SEQ ID NO: 23 - DNA, 24 bp, Artificial Sequence
  primer RAGE_Intron8R1
atttagctcagagggaagaaggga

SEQ ID NO: 24 - DNA, 5084 bp, Homo Sapiens
  ref <308>: DATABASE ACCESSION NUMBER: GenBank No. NM_00022
  ref <309>: DATABASE ENTRY DATE: 2003-12-20
gatcccatcgcagctaccgcgatgagaggcgctcgcggcgcctgggattttctctgcgttctgctcctactgcttcgcgtccagacaggctcttctcaaccatctgtgagtccaggggaaccgtctccaccatccatccatccaggaaaatcagacttaatagtccgcgtgggcgacgagattaggctgttatgcactgatccgggctttgtcaaatggacttttgagatcctggatgaaacgaatgagaataagcagaatgaatggatcacggaaaaggcagaagccaccaacaccggcaaatacacgtgcaccaacaaacacggcttaagcaattccatttatgtgtttgttagagatcctgccaagcttttccttgttgaccgctccttgtatgggaaagaagacaacgacacgctggtccgctgtcctctcacagacccagaagtgaccaattattccctcaaggggtgccaggggaagcctcttcccaaggacttgaggtttattcctgaccccaaggcgggcatcatgatcaaaagtgtgaaacgcgcctaccatcggctctgtctgcattgttctgtggaccaggagggcaagtcagtgctgtcggaaaaattcatcctgaaagtgaggccagccttcaaagctgtgcctgttgtgtctgtgtccaaagcaagctatcttcttagggaaggggaagaattcacagtgacgtgcacaataaaagatgtgtctagttctgtgtactcaacgtggaaaagagaaaacagtcagactaaactacaggagaaatataatagctggcatcacggtgacttcaattatgaacgtcaggcaacgttgactatcagttcagcgagagttaatgattctggagtgttcatgtgttatgccaataatacttttggatcagcaaatgtcacaacaaccttggaagtagtagataaaggattcattaatatcttccccatgataaacactacagtatttgtaaacgatggagaaaatgtagatttgattgttgaatatgaagcattccccaaacctgaacaccagcagtggatctatatgaacagaaccttcactgataaatgggaagattatcccaagtctgagaatgaaagtaatatcagatacgtaagtgaacttcatctaacgagattaaaaggcaccgaaggaggcacttacacattcctagtgtccaattctgacgtcaatgctgccatagcatttaatgtttatgtgaatacaaaaccagaaatcctgacttacgacaggctcgtgaatggcatgctccaatgtgtggcagcaggattcccagagcccacaatagattggtatttttgtccaggaactgagcagagatgctctgcttctgtactgccagtggatgtgcagacactaaactcatctgggccaccgtttggaaagctagtggttcagagttctatagattctagtgcattcaagcacaatggcacggttgaatgtaaggcttacaacgatgtgggcaagacttctgcctattttaactttgcatttaaaggtaacaacaaagagcaaatccatccccacaccctgttcactcctttgctgattggtttcgtaatcgtagctggcatgatgtgcattattgtgatgattctgacctacaaatatttacagaaacccatgtatgaagtacagtggaaggttgttgaggagataaatggaaacaattatgtttacatagacccaacacaacttccttatgatcacaaatgggagtttcccagaaacaggctgagttttgggaaaaccctgggtgctggagctttcgggaaggttgttgaggcaactgcttatggcttaattaagtcagatgcggccatgactgtcgctgtaaagatgctcaagccgagtgcccatttgacagaacgggaagccctcatgtctgaactcaaagtcctgagttaccttggtaatcacatgaatattgtgaatctacttggagcctgcaccattggagggcccaccctggtcattacagaatattgttgctatggtgatcttttgaattttttgagaagaaaacgtgattcatttatttgttcaaagcaggaagatcatgcagaagctgcactttataagaatcttctgcattcaaaggagtcttcctgcagcgatagtactaatgagtacatggacatgaaacctggagtttcttatgttgtcccaaccaaggccgacaaaaggagatctgtgagaataggctcatacatagaaagagatgtgactcccgccatcatggaggatgacgagttggccctagacttagaagacttgctgagcttttcttaccaggtggcaaagggcatggctttcctcgcctccaagaattgtattcacagagacttggcagccagaaatatcctccttactcatggtcggatcacaaagatttgtgattttggtctagccagagacatcaagaatgattctaattatgtggttaaaggaaacgctcgactacctgtgaagtggatggcacctgaaagcattttcaactgtgtatacacgtttgaaagtgacgtctggtcctatgggatttttctttgggagctgttctctttaggaagcagcccctatcctggaatgccggtcgattctaagttctacaagatgatcaaggaaggcttccggatgctcagccctgaacacgcacctgctgaaatgtatgacataatgaagacttgctgggatgcagatcccctaaaaagaccaacattcaagcaaattgttcagctaattgagaagcagatttcagagagcaccaatcatatttactccaacttagcaaactgcagccccaaccgacagaagcccgtggtagaccattctgtgcggatcaattctgtcggcagcaccgcttcctcctcccagcctctgcttgtgcacgacgatgtctgagcagaatcagtgtttgggtcacccctccaggaatgatctcttcttttggcttccatgatggttattttcttttctttcaacttgcatccaactccaggatagtgggcaccccactgcaatcctgtctttctgagcacactttagtggccgatgatttttgtcatcagccaccatcctattgcaaaggttccaactgtatatattcccaatagcaacgtagcttctaccatgaacagaaaacattctgatttggaaaaagagagggaggtatggactgggggccagagtcctttccaaggcttctccaattctgcccaaaaatatggttgatagtttacctgaataaatggtagtaatcacagttggccttcagaaccatccatagtagtatgatgatacaagattagaagctgaaaacctaagtcctttatgtggaaaacagaacatcattagaacaaaggacagagtatgaacacctgggcttaagaaatctagtatttcatgctgggaatgagacataggccatgaaaaaaatgatccccaagtgtgaacaaaagatgctcttctgtggaccactgcatgagcttttatactaccgacctggtttttaaatagagtttgctattagagcattgaattggagagaaggcctccctagccagcacttgtatatacgcatctataaattgtccgtgttcatacatttgaggggaaaacaccataaggtttcgtttctgtatacaaccctggcattatgtccactgtgtatagaagtagattaagagccatataagtttgaaggaaacagttaataccattttttaaggaaacaatataaccacaaagcacagtttgaacaaaatctcctcttttagctgatgaacttattctgtagattctgtggaacaagcctatcagcttcagaatggcattgtactcaatggatttgatgctgtttgacaaagttactgattcactgcatggctcccacaggagtgggaaaacactgccatcttagtttggattcttatgtagcaggaaataaagtataggtttagcctccttcgcaggcatgtcctggacaccgggccagtatctatatatgtgtatgtacgtttgtatgtgtgtagacaaatatttggaggggtatttttgccctgagtccaagagggtcctttagtacctgaaaagtaacttggctttcattattagtactgctcttgtttcttttcacatagctgtctagagtagcttaccagaagcttccatagtggtgcagaggaagtggaaggcatcagtccctatgtatttgcagttcacctgcacttaaggcactctgttatttagactcatcttactgtacctgttccttagaccttccataatgctactgtctcactgaaacatttaaattttaccctttagactgtagcctggatattattcttgtagtttacctctttaaaaacaaaacaaaacaaaacaaaaaactccccttcctcactgcccaatataaaaggcaaatgtgtacatggcagagtttgtgtgttgtcttgaaagattcaggtatgttgcctttatggtttcccccttctacatttcttagactacatttagagaactgtggccgttatctggaagtaaccatttgcactggagttctatgctctcgcacctttccaaagttaacagattttggggttgtgttgtcacccaagagattgttgtttgccatactttgtctgaaaaattcctttgtgtttctattgacttcaatgatagtaagaaaagtggttgttagttatagatgtctaggtacttcaggggcacttcattgagagttttgtcttgccatactttgtctgaaaaattcctttgtgtttctattgacttcaatgatagtaagaaaagtggttgttagttatagatgtctaggtacttcaggggcacttcattgagagttttgtcaatgtcttttgaatattcccaagcccatgagtccttgaaaatattttttatatatacagtaactttatgtgtaaatacataagcggcgtaagtttaaaggatgttggtgttccacgtgttttattcctgtatgttgtccaattgttgacagttctgaagaattc

SEQ ID NO: 25 - DNA, 3015 bp, Homo Sapiens
  ref <308>: DATABASE ACCESSION NUMBER: GenBank NM_002011
  ref <309>: DATABASE ENTRY DATE: 2004-05-20
ccgaggagcgctcgggctgtctgcggaccctgccgcgtgcaggggtcgcggccggctggagctgggagtgaggcggcggaggagccaggtgaggaggagccaggaaggcagttggtgggaagtccagcttgggtccctgagagctgtgagaaggagatgcggctgctgctggccctgttgggggtcctgctgagtgtgcctgggcctccagtcttgtccctggaggcctctgaggaagtggagcttgagccctgcctggctcccagcctggagcagcaagagcaggagctgacagtagcccttgggcagcctgtgcggctgtgctgtgggcgggctgagcgtggtggccactggtacaaggagggcagtcgcctggcacctgctggccgtgtacggggctggaggggccgcctagagattgccagcttcctacctgaggatgctggccgctacctctgcctggcacgaggctccatgatcgtcctgcagaatctcaccttgattacaggtgactccttgacctccagcaacgatgatgaggaccccaagtcccatagggacctctcgaataggcacagttacccccagcaagcaccctactggacacacccccagcgcatggagaagaaactgcatgcagtacctgcggggaacaccgtcaagttccgctgtccagctgcaggcaaccccacgcccaccatccgctggcttaaggatggacaggcctttcatggggagaaccgcattggaggcattcggctgcgccatcagcactggagtctcgtgatggagagcgtggtgccctcggaccgcggcacatacacctgcctggtagagaacgctgtgggcagcatccgctataactacctgctagatgtgctggagcggtccccgcaccggcccatcctgcaggccgggctcccggccaacaccacagccgtggtgggcagcgacgtggagctgctgtgcaaggtgtacagcgatgcccagccccacatccagtggctgaagcacatcgtcatcaacggcagcagcttcggagccgacggtttcccctatgtgcaagtcctaaagactgcagacatcaatagctcagaggtggaggtcctgtacctgcggaacgtgtcagccgaggacgcaggcgagtacacctgcctcgcaggcaattccatcggcctctcctaccagtctgcctggctcacggtgctgccagaggaggaccccacatggaccgcagcagcgcccgaggccaggtatacggacatcatcctgtacgcgtcgggctccctggccttggctgtgctcctgctgctggccgggctgtatcgagggcaggcgctccacggccggcacccccgcccgcccgccactgtgcagaagctctcccgcttccctctggcccgacagttctccctggagtcaggctcttccggcaagtcaagctcatccctggtacgaggcgtgcgtctctcctccagcggccccgccttgctcgccggcctcgtgagtctagatctacctctcgacccactatgggagttcccccgggacaggctggtgcttgggaagcccctaggcgagggctgctttggccaggtagtacgtgcagaggcctttggcatggaccctgcccggcctgaccaagccagcactgtggccgtcaagatgctcaaagacaacgcctctgacaaggacctggccgacctggtctcggagatggaggtgatgaagctgatcggccgacacaagaacatcatcaacctgcttggtgtctgcacccaggaagggcccctgtacgtgatcgtggagtgcgccgccaagggaaacctgcgggagttcctgcgggcccggcgccccccaggccccgacctcagccccgacggtcctcggagcagtgaggggccgctctccttcccagtcctggtctcctgcgcctaccaggtggcccgaggcatgcagtatctggagtcccggaagtgtatccaccgggacctggctgcccgcaatgtgctggtgactgaggacaatgtgatgaagattgctgactttgggctggcccgcggcgtccaccacattgactactataagaaaaccagcaacggccgcctgcctgtgaagtggatggcgcccgaggccttgtttgaccgggtgtacacacaccagagtgacgtgtggtcttttgggatcctgctatgggagatcttcaccctcgggggctccccgtatcctggcatcccggtggaggagctgttctcgctgctgcgggagggacatcggatggaccgacccccacactgccccccagagctgtacgggctgatgcgtgagtgctggcacgcagcgccctcccagaggcctaccttcaagcagctggtggaggcgctggacaaggtcctgctggccgtctctgaggagtacctcgacctccgcctgaccttcggaccctattccccctctggtggggacgccagcagcacctgctcctccagcgattctgtcttcagccacgaccccctgccattgggatccagctccttccccttcgggtctggggtgcagacatgagcaaggctcaaggctgtgcaggcacataggctggtggccttgggccttggggctcagccacagcctgacacagtgctcgaccttgatagcatggggcccctggcccagagttgctgtgccgtgtccaagggccgtgcccttgcccttggagctgccgtgcctgtgtcctgatggcccaaatgtcagggttctgctcggcttcttggaccatggcgcttagtccccatcccgggtttggctgagcctggctggagagctgctatgctaaacctcctgcctcccaataccagcaggaggttctgggcctctgaaccccctttccccacacctccccctgctgctgctgccccagcgtcttgacgggagcattggcccctgagcccagagaagctggaagcctgccgaaaacaggagcaaatggcgttttataaattatttttttgaaataaa

SEQ ID NO: 26 - DNA, 3682 bp, Homo Sapiens
  ref <308>: DATABASE ACCESSION NUMBER: GenBank NM_001066
  ref <309>: DATABASE ENTRY DATE: 2003-12-20
gcgagcgcagcggagcctggagagaaggcgctgggctgcgagggcgcgagggcgcgagggcagggggcaaccggaccccgcccgcacccatggcgcccgtcgccgtctgggccgcgctggccgtcggactggagctctgggctgcggcgcacgccttgcccgcccaggtggcatttacaccctacgccccggagcccgggagcacatgccggctcagagaatactatgaccagacagctcagatgtgctgcagcaaatgctcgccgggccaacatgcaaaagtcttctgtaccaagacctcggacaccgtgtgtgactcctgtgaggacagcacatacacccagctctggaactgggttcccgagtgcttgagctgtggctcccgctgtagctctgaccaggtggaaactcaagcctgcactcgggaacagaaccgcatctgcacctgcaggcccggctggtactgcgcgctgagcaagcaggaggggtgccggctgtgcgcgccgctgcgcaagtgccgcccgggcttcggcgtggccagaccaggaactgaaacatcagacgtggtgtgcaagccctgtgccccggggacgttctccaacacgacttcatccacggatatttgcaggccccaccagatctgtaacgtggtggccatccctgggaatgcaagcatggatgcagtctgcacgtccacgtcccccacccggagtatggccccaggggcagtacacttaccccagccagtgtccacacgatcccaacacacgcagccaactccagaacccagcactgctccaagcacctccttcctgctcccaatgggccccagccccccagctgaagggagcactggcgacttcgctcttccagttggactgattgtgggtgtgacagccttgggtctactaataataggagtggtgaactgtgtcatcatgacccaggtgaaaaagaagcccttgtgcctgcagagagaagccaaggtgcctcacttgcctgccgataaggcccggggtacacagggccccgagcagcagcacctgctgatcacagcgccgagctccagcagcagctccctggagagctcggccagtgcgttggacagaagggcgcccactcggaaccagccacaggcaccaggcgtggaggccagtggggccggggaggcccgggccagcaccgggagctcagattcttcccctggtggccatgggacccaggtcaatgtcacctgcatcgtgaacgtctgtagcagctctgaccacagctcacagtgctcctcccaagccagctccacaatgggagacacagattccagcccctcggagtccccgaaggacgagcaggtccccttctccaaggaggaatgtgcctttcggtcacagctggagacgccagagaccctgctggggagcaccgaagagaagcccctgccccttggagtgcctgatgctgggatgaagcccagttaaccaggccggtgtgggctgtgtcgtagccaaggtgggctgagccctggcaggatgaccctgcgaaggggccctggtccttccaggcccccaccactaggactctgaggctctttctgggccaagttcctctagtgccctccacagccgcagcctccctctgacctgcaggccaagagcagaggcagcgagttgtggaaagcctctgctgccatggcgtgtccctctcggaaggctggctgggcatggacgttcggggcatgctggggcaagtccctgactctctgtgacctgccccgcccagctgcacctgccagcctggcttctggagcccttgggttttttgtttgtttgtttgtttgtttgtttgtttctccccctgggctctgccccagctctggcttccagaaaaccccagcatccttttctgcagaggggctttctggagaggagggatgctgcctgagtcacccatgaagacaggacagtgcttcagcctgaggctgagactgcgggatggtcctggggctctgtgcagggaggaggtggcagccctgtagggaacggggtccttcaagttagctcaggaggcttggaaagcatcacctcaggccaggtgcagtggctcacgcctatgatcccagcactttgggaggctgaggcgggtggatcacctgaggttaggagttcgagaccagcctggccaacatggtaaaaccccatctctactaaaaatacagaaattagccgggcgtggtggcgggcacctatagtcccagctactcagaagcctgaggctgggaaatcgtttgaacccgggaagcggaggttgcagggagccgagatcacgccactgcactccagcctgggcgacagagcgagagtctgtctcaaaagaaaaaaaaaagcaccgcctccaaatgccaacttgtccttttgtaccatggtgtgaaagtcagatgcccagagggcccaggcaggccaccatattcagtgctgtggcctgggcaagataacgcacttctaactagaaatctgccaattttttaaaaaagtaagtaccactcaggccaacaagccaacgacaaagccaaactctgccagccacatccaaccccccacctgccatttgcaccctccgccttcactccggtgtgcctgcagccccgcgcctccttccttgctgtcctaggccacaccatctcctttcagggaatttcaggaactagagatgactgagtcctcgtagccatctctctactcctacctcagcctagaccctcctcctcccccagaggggtgggttcctcttccccactccccaccttcaattcctgggccccaaacgggctgccctgccactttggtacatggccagtgtgatcccaagtgccagtcttgtgtctgcgtctgtgttgcgtgtcgtgggtgtgtgtagccaaggtcggtaagttgaatggcctgccttgaagccactgaagctgggattcctccccattagagtcagccttccccctcccagggccagggccctgcagaggggaaaccagtgtagccttgcccggattctgggaggaagcaggttgaggggctcctggaaaggctcagtctcaggagcatggggataaaggagaaggcatgaaattgtctagcagagcaggggcagggtgataaattgttgataaattccactggacttgagcttggcagctgaactattggagggtgggagagcccagccattaccatggagacaagaagggttttccaccctggaatcaagatgtcagactggctggctgcagtgacgtgcacctgtactcaggaggctgaggggaggatcactggagcccaggagtttgaggctgcagcgagctatgatcgcgccactacactccagcctgagcaacagagtgagaccctgtctcttaaagaaaaaaaaagtcagactgctgggactggccaggtttctgcccacattggacccacatgaggacatgatggagcgcacctgccccctggtggacagtcctgggagaacctcaggcttccttggcatcacagggcagagccgggaagcgatgaatttggagactctgtggggccttggttcccttgtgtgtgtgtgttgatcccaagacaatgaaagtttgcactgtatgctggacggcattcctgcttatcaataaacctgtttgttttaaaaaaaa

SEQ ID NO: 27 - DNA, 713 bp, Homo sapiens
tgggtccctgagagctgtgagaaggagatgcggctgctgctggccctgttgggggtcctgctgagtgtgcctgggcctccagtcttgtccctggaggcctctgaggaagtggagcttgcaagcattcatctatcactgtgtctgcgagagaggactggccttgcagggcgcagggccctaagctgggctgcagagctggtgagccctgcctggctcccagcctggagcagcaagagcaggagctgacagtagcccttgggcagcctgtgcgtctgtgctgtgggcgggctgagcgtggtggccactggtacaaggagggcagtcgcctggcacctgctggccgtgtacggggctggaggggccgcctagagattgccagcttcctacctgaggatgctggccgctacctctgcctggcacgaggctccatgatcgtcctgcagaatctcaccttgattacaggtgactccttgacctccagcaacgatgatgaggaccccaagtcccatagggacccctcgaataggcacagttacccccagcaagcaccctactggacacacccccagcgcatggagaagaaactgcatgcagtacctgcggggaacaccgtcaagttccgctgtccagctgcaggcaaccccacgcccaccatccgctggcttaaggatggacaggcctttcatggggagaaccgcattggaggcattcgg

SEQ ID NO: 28 - protein, 72 aa, Homo sapiens
MRLLLALLGVLLSVPGPPVLSLEASEEVELASIHLSLCLRERTGLAGRRALSWAAELVSPAWLPAWSSKSRS

SEQ ID NO: 29 - DNA, 1582 bp, Homo sapiens
gatcccatcgcagctaccgcgatgagaggcgctcgcggcgcctgggattttctctgcgttctgctcctactgcttcgcgtccagacaggctcttctcaaccatctgtgagtccaggggaaccgtctccaccatccatccatccaggaaaatcagacttaatagtccgcgtgggcgacgagattaggctgttatgcactgatccgggctttgtcaaatggacttttgagatcctggatgaaacgaatgagaataagcagaatgaatggatcacggaaaaggcagaagccaccaacaccggcaaatacacgtgcaccaacaaacacggcttaagcaattccatttatgtgtttgttagagatcctgccaagcttttccttgttgaccgctccttgtatgggaaagaagacaacgacacgctggtccgctgtcctctcacagacccagaagtgaccaattattccctcaaggggtgccaggggaagcctcttcccaaggacttgaggtttattcctgaccccaaggcgggcatcatgatcaaaagtgtgaaacgcgcctaccatcggctctgtctgcattgttctgtggaccaggagggcaagtcagtgctgtcggaaaaattcatcctgaaagtgaggccagccttcaaagctgtgcctgttgtgtctgtgtccaaagcaagctatcttcttagggaaggggaagaattcacagtgacgtgcacaataaaagatgtgtctagttctgtgtactcaacgtggaaaagagaaaacagtcagactaaactacaggagaaatataatagctggcatcacggtgacttcaattatgaacgtcaggcaacgttgactatcagttcagcgagagttaatgattctggagtgttcatgtgttatgccaataatacttttggatcagcaaatgtcacaacaaccttggaagtagtagataaaggattcattaatatcttccccatgataaacactacagtatttgtaaacgatggagaaaatgtagatttgattgttgaatatgaagcattccccaaacctgaacaccagcagtggatctatatgaacagaaccttcactgataaatgggaagattatcccaagtctgagaatgaaagtaatatcagatacgtaagtgaacttcatctaacgagattaaaaggcaccgaaggaggcacttacacattcctagtgtccaattctgacgtcaatgctgccatagcatttaatgtttatgtgaatacttccctgtaaatagagtgattcggcttttaatcggcaccacccttccacccccaaaaaggagaaaattcatcaaaaccagaaatcctgacttacgacaggctcgtgaatggcatgctccaatgtgtggcagcaggattcccagagcccacaatagattggtatttttgtccaggaactgagcagagatgctctgcttctgtactgccagtggatgtgcagacactaaactcatctgggccaccgtttggaaagctagtggttcagagttctatagattctagtgcattcaagcacaatggcacggttgaatgtaaggcttacaacgatg

SEQ ID NO: 30 - protein, 413 aa, Homo sapiens
MRGARGAWDFLCVLLLLLRVQTGSSQPSVSPGEPSPPSIHPGKSDLIVRVGDEIRLLCTDPGFVKWTFEILDETNENKQNEWITEKAEATNTGKYTCTNKHGLSNSIYVFVRDPAKLFLVDRSLYGKEDNDTLVRCPLTDPEVTNYSLKGCQGKPLPKDLRFIPDPKAGIMIKSVKRAYHRLCLHCSVDQEGKSVLSEKFILKVRPAFKAVPVVSVSKASYLLREGEEFTVTCTIKDVSSSVYSTWKRENSQTKLQEKYNSWHHGDFNYERQATLTISSARVNDSGVFMCYANNTFGSANVTTTLEVVDKGFINIFPMINTTVFVNDGENVDLIVEYEAFPKPEHQQWIYMNRTFTDKWEDYPKSENESNIRYVSELHLTRLKGTEGGTYTFLVSNSDVNAAIAFNVYVNTSL

SEQ ID NO: 31 - DNA, 913 bp, Homo sapiens
agaaggcgctgggctgcgagggcgcgagggcgcgagggcagggggcaaccggaccccgcccgcacccatggcgcccgtcgccgtctgggccgcgctggccgtcggactggagctctgggctgcggcgcacgccttgcccgcccaggtggcatttacaccctacgccccggagcccgggagcacatgccggctcagagaatactatgaccagacagctcagatgtgctgcagcaaatgctcgccgggccaacatgcaaaagtcttctgtaccaagacctcggacaccgtgtgtgactcctgtgaggacagcacatacacccagctctggaactgggttcccgagtgcttgagctgtggctcccgctgtagctctgaccaggtggaaactcaagcctgcactcgggaacagaaccgcatctgcacctgcaggcccggctggtactgcgcgctgagcaagcaggaggggtgccggctgtgcgcgccgctgcgcaagtgccgcccgggcttcggcgtggccagaccagacctctcctagggctctagtgccaaggcccagctgtcccgcagagtgtctgagtggttgacaagttcggattgttccctgaaggaactgaaacatcagacgtggtgtgcaagccctgtgccccggggacgttctccaacacgacttcatccacggatatttgcaggccccaccagatctgtaacgtggtggccatccctgggaatgcaagcatggatgcagtctgcacgtccacgtcccccacccggagtatggccccaggggcagtacacttaccccagccagtgtccacacgatcccaacacacgcagccaactccagaacccagcactgctccaagcacctccttcctgctcccaatgggccccagccccccagctgaagggagca

SEQ ID NO: 32 - protein, 155 aa, Homo sapiens
MAPVAVWAALAVGLELWAAAHALPAQVAFTPYAPEPGSTCRLREYYDQTAQMCCSKCSPGQHAKVFCTKTSDTVCDSCEDSTYTQLWNWVPECLSCGSRCSSDQVETQACTREQNRICTCRPGWYCALSKQEGCRLCAPLRKCRPGFGVARPDLS

SEQ ID NO: 33 - protein, 680 aa, Homo sapiens
MELAALCRWGLLLALLPLPPGAASTQVCTGTDMKLRLPASPETHLDMLRHLYQGCQVVQGNLELTYLPTNASLSFLQDIQEVQGYVLIAHNQVRQVPLQRLRIVRGTQLFEDNYALAVLDNGDPLNNTTPVTGASPGGLRELQLRSLTEILKGGVLIQRNPQLCYQDTILWKDIFHKNNQLALTLIDTNRSRACHPCSPMCKGSRCWGESSEDCQSLTRTVCAGGCARCKGPLPTDCCHEQCAAGCTGPKHSDCLACLHFNHSGICELHCPALVTYNTDTFESMPNPEGRYTFGASCVTACPYNYLSTDVGSCTLVCPLHNQEVTAEDGTQRCEKCSKPCARVCYGLGMEHLREVRAVTSANIQEFAGCKKIFGSLAFLPESFDGDPASNTAPLQPEQLQVFETLEEITGYLYISAWPDSLPDLSVFQNLQVIRGRILHNGAYSLTLQGLGISWLGLRSLRELGSGLALIHHNTHLCFVHTVPWDQLFRNPHQALLHTANRPEDECVGEGLACHQLCARGHCWGPGPTQCVNCSQFLRGQECVEECRVLQGLPREYVNARHCLPCHPECQPQNGSVTCFGPEADQCVACAHYKDPPFCVARCPSGVKPDLSYMPIWKFPDEEGACQPCPINCTHSCVDLDDKGCPAEQRARLAWTPGCTLHCPSLPHWMLGGHCCREGTP

SEQ ID NO: 34 - protein, 633 aa, Homo sapiens
MELAALCRWGLLLALLPPGAASTQVCTGTDMKLRLPASPETHLDMLRHLYQGCQVVQGNLELTYLPTNASLSFLQDIQEVQGYVLIAHNQVRQVPLQRLRIVRGTQLFEDNYALAVLDNGDPLNNTTPVTGASPGGLRELQLRSLTEILKGGVLIQRNPQLCYQDTILWKDIFHKNNQLALTLIDTNRSRACHPCSPMCKGSRCWGESSEDCQSLTRTVCAGGCARCKGPLPTDCCHEQCAAGCTGPKHSDCLACLHFNHSGICELHCPALVTYNTDTFESMPNPEGRYTFGASCVTACPYNYLSTDVGSCTLVCPLHNQEVTAEDGTQRCEKCSKPCARVCYGLGMEHLREVRAVTSANIQEFAGCKKIFGSLAFLPESFDGDPASNTAPLQPEQLQVFETLEEITGYLYISAWPDSLPDLSVFQNLQVIRGRILHNGAYSLTLQGLGISWLGLRSLRELGSGLALIHHNTHLCFVHTVPWDQLFRNPHQALLHTANRPEDECVGEGLACHQLCARGHCWGPGPTQCVNCSQFLRGQECVEECRVLQGLPREYVNARHCLPCHPECQPQNGSVTCFGPEADQCVACAHYKDPPFCVARCPSGVKPDLSYMPIWKFPDEEGACQPCPINCTHS

SEQ ID NO: 35 - protein, 575 aa, Homo sapiens
MELAALCRWGLLLALLPPGAASTQVCTGTDMKLRLPASPETHLDMLRHLYQGCQVVQGNLELTYLPTNASLSFLQDIQEVQGYVLIAHNQVRQVPLQRLRIVRGTQLFEDNYALAVLDNGDPLNNTTPVTGASPGGLRELQLRSLTEILKGGVLIQRNPQLCYQDTILWKDIFHKNNQLALTLIDTNRSRACHPCSPMCKGSRCWGESSEDCQSLTRTVCAGGCARCKGPLPTDCCHEQCAAGCTGPKHSDCLACLHFNHSGICELHCPALVTYNTDTFESMPNPEGRYTFGASCVTACPYNYLSTDVGSCTLVCPLHNQEVTAEDGTQRCEKCSKPCARVCYGLGMEHLREVRAVTSANIQEFAGCKKIFGSLAFLPESFDGDPASNTAPLQPEQLQVFETLEEITGYLYISAWPDSLPDLSVFQNLQVIRGRILHNGAYSLTLQGLGISWLGLRSLRELGSGLALIHHYTHLCFVHTVPWDQLFRNPHQALLHTANRPEDECGKTGSPVCALPICQHTAVPRGPWQQRSWTCADCPSLCTLLDSAQLWLAWPLGMASLAGSYLPWHPSLPLCF

SEQ ID NO: 36 - protein, 523 aa, Homo sapiens
MVSYWDTGVLLCALLSCLLLTGSSSGSKLKDPELSLKGTQHIMQAGQTLHLQCRGEAAHKWSLPEMVSKESERLSITKSACGRNGKQFCSTLTLNTAQANHTGFYSCKYLAVPTSKKKETESAIYIFISDTGRPFVEMYSEIPEIIHMTEGRELVIPCRVTSPNITVTLKKFPLDTLIPDGKRIIWDSRKGFIISNATYKEIGLLTCEATVNGHLYKTNYLTHRQTNTIIDVQISTPRPVKLLRGHTLVLNCTATTPLNTRVQMTWSYPDEKNKRASVRRRIDQSNSHANIFYSVLTIDKMQNKDKGLYTCRVRSGPSFKSVNTSVHIYDKAFITVKHRKQQVLETVAGKRSYRLSMKVKAFPSPEVVWLKDGLPATEKSARYLTRGYSLIIKDVTEEDAGNYTILLSIKQSNVFKNLTATLIVNVKPQIYEILTCTAYGIPQPTIKWFWHPCNHNHSEARCDFCSNNEESFILDADSNMGNRIESITQRMAIIEGKNKLPPANSSFMLPPTSFSSNYFHFLP

SEQ ID NO: 37 - protein, 541 aa, Homo sapiens
MVSYWDTGVLLCALLSCLLLTGSSSGSKLKDPELSLKGTQHIMQAGQTLHLQCRGEAAHKWSLPEMVSKESERLSITKSACGRNGKQFCSTLTLNTAQANHTGFYSCKYLAVPTSKKKETESAIYIFISDTGRPFVEMYSEIPEIIHMTEGRELVIPCRVTSPNITVTLKKFPLDTLIPDGKRIIWDSRKGFIISNATYKEIGLLTCEATVNGHLYKTNYLTHRQTNTIIDVQISTPRPVKLLRGHTLVLNCTATTPLNTRVQMTWSYPDEKNKRASVRRRIDQSNSHANIFYSVLTIDKMQNKDKGLYTCRVRSGPSFKSVNTSVHIYDKAFITVKHRKQQVLETVAGKRSYRLSMKVKAFPSPEVVWLKDGLPATEKSARYLTRGYSLIIKDVTEEDAGNYTILLSIKQSNVFKNLTATLIVNVKPQIYEKAVSSFPDPALYPLGSRQILTCTAYGIPQPTIKWFWHPCNHNHSEARCDFCSNNEESFILDADSNMGNRIESITQRMAIIEGKNKLPPANSSFMLPPTSFSSNYFHFLP

SEQ ID NO: 38 - protein, 436 aa, Homo sapiens
MVSYWDTGVLLCALLSCLLLTGSSSGSKLKDPELSLKGTQHIMQAGQTLHLQCRGEAAHKWSLPEMVSKESERLSITKSACGRNGKQFCSTLTLNTAQANHTGFYSCKYLAVPTSKKKETESAIYIFISDTGRPFVEMYSEIPEIIHMTEGRELVIPCRVTSPNITVTLKKFPLDTLIPDGKRIIWDSRKGFIISNATYKEIGLLTCEATVNGHLYKTNYLTHRQTNTIIDVQISTPRPVKLLRGHTLVLNCTATTPLNTRVQMTWSYPDEKNKRASVRRRIDQSNSHANIFYSVLTIDKMQNKDKGLYTCRVRSGPSFKSVNTSVHIYDKAFITVKHRKQQVLETVAGKRSYRLSMKVKAFPSPEVVWLKDGLPATEKSARYLTRGYSLIIKDKNLTATLIVNVKPQERIRERISPDLYRIWYPSTYNQVVLAPL

SEQ ID NO: 39 - protein, 365 aa, Homo sapiens
MVSYWDTGVLLCALLSCLLLTGSSSGSKLKDPELSLKGTQHIMQAGQTLHLQCRGEAAHKWSLPEMVSKESERLSITKSACGRNGKQFCSTLTLNTAQANHTGFYSCKYLAVPTSKKKETESAIYIFISDTGRPFVEMYSEIPEIIHMTEGRELVIPCRVTSPNITVTLKKFPLDTLIPDGKRIIWDSRKGFIISNATYKEIGLLTCEATVNGHLYKTNYLTHRQTNTIIDVQISTPRPVKLLRGHTLVLNCTATTPLNTRVQMTWSYPDEKNKRASVRRRIDQSNSHANIFYSVLTIDKMQNKDKGLYTCRVRSGPSFKSVNTSVHIYGKHSSALPTHAMLSNHCRCLCSLNKSVFCWPRVTLS

SEQ ID NO: 40 - protein, 934 aa, Homo sapiens
MKAPAVLAPGILVLLFTLVQRSNGECKEALAKSEMNVNMKYQLPNFTAETPIQNVILHEHHIFLGATNYIYVLNEEDLQKVAEYKTGPVLEHPDCFPCQDCSSKANLSGGVWKDNINMALVVDTYYDDQLISCGSVNRGTCQRHVFPHNHTADIQSEVHCIFSPQIEEPSQCPDCVVSALGAKVLSSVKDRFINFFVGNTINSSYFPDHPLHSISVRRLKETKDGFMFLTDQSYIDVLPEFRDSYPIKYVHAFESNNFIYFLTVQRETLDAQTFHTRIIRFCSINSGLHSYMEMPLECILTEKRKKRSTKKEVFNILQAAYVSKPGAQLARQIGASLNDDILFGVFAQSKPDSAEPMDRSAMCAFPIKYVNDFFNKIVNKNNVRCLQHFYGPNHEHCFNRTLLRNSSGCEARRDEYRTEFTTALQRVDLFMGQFSEVLLTSISTFIKGDLTIANLGTSEGRFMQVVVSRSGPSTPHVNFLLDSHPVSPEVIVEHTLNQNGYTLVITGKKITKIPLNGLGCRHFQSCSQCLSAPPFVQCGWCHDKCVRSEECLSGTWTQQICLPAIYKVFPNSAPLEGGTRLTICGWDFGFRRNNKFDLKKTRVLLGNESCTLTLSESTMNTLKCTVGPAMNKHFNMSIIISNGHGTTQYSTFSYVDPVITSISPKYGPMAGGTLLTLTGNYLNSGNSRHISIGGKTCTLKSVSNSILECYTPAQTISTEFAVKLKIDLANRETSIFSYREDPIVYEIHPTKSFISGGSTITGVGKNLNSVSVPRMVINVHEAGRNFTVACQHRSNSEIICCTTPSLQQLNLQLPLKTKAFFMLDGILSKYFDLIYVHNPVFKPFEKPVMISMGNENVLEIKGNDIDPEAVKGEVLKVGNKSCENIHLHSEAVLCTVPNDLLKLNSELNIEVGFLHSSHDVNKEASVIMLFSGLK

SEQ ID NO: 41 - protein, 821 aa, Homo sapiens
MDSLASLVLCGVSLLLSGTVEGAMDLILINSLPLVSDAETSLTCIASGWRPHEPITIGRDFEALMNQHQDPLEVTQDVTREWAKKVVWKREKASKINGAYFCEGRVRGEAIRIRTMKMRQQASFLPATLTMTVDKGDNVNISFKKVLIKEEDAVIYKNGSFIHSVPRHEVPDILEVHLPHAQPQDAGVYSARYIGGNLFTSAFTRLIVRRCEAQKWGPECNHLCTACMNNGVCHEDTGECICPPGFMGRTCEKACELHTFGRTCKERCSGQEGCKSYVFCLPDPYGCSCATGWKGLQCNEGIQRMTPKIVDLPDHIEVNSGKFNPICKASGWPLPTNEEMTLVKPDGTVLHPKDFNHTDHFSVAIFTIHRILPPDSGVWVCSVNTVAGMVEKPFNISVKVLPKPLNAPNVIDTGHNFAVINISSEPYFGDGPIKSKKLLYKPVNHYEAWQHIQVTNEIVTLNYLEPRTEYELCVQLVRRGEGGEGHPGPVRRFTTASIGLPPPRGLNLLPKSQTTLNLTWQPSSEDDFYVEVERRSVQKSDQQNIKVPGNLTSVLLNNLHPREQYVVRARVNTKAQGEWSEDLTAWTLSDILPPQPENIKISNITHSSAVISWTILDGYSISSITIRYKVQGKNEDQHVDVKIKNATITQYQLKGLEPETAYQVDIFAENNIGSSNPAFSHELVTLPESQAPADLGGGKMLLIAILGSAGMTCLTVLLAFLIILQLKRANVQRRMAQAFQNVREEPAVQFNSGTLALNRKVKNNPDPTIYPVLDWNDIKFQDVIGEGNFGQVLKARIKKDGLRMDAAIKRMKEYASKDDHR

SEQ ID NO: 42 - protein, 864 aa, Homo sapiens
MDSLASLVLCGVSLLLSGTVEGAMDLILINSLPLVSDAETSLTCIASGWRPHEPITIGRDFEALMNQHQDPLEVTQDVTREWAKKVVWKREKASKINGAYFCEGRVRGEAIRIRTMKMRQQASFLPATLTMTVDKGDNVNISFKKVLIKEEDAVIYKNGSFIHSVPRHEVPDILEVHLPHAQPQDAGVYSARYIGGNLFTSAFTRLIVRRCEAQKWGPECNHLCTACMNNGVCHEDTGECICPPGFMGRTCEKACELHTFGRTCKERCSGQEGCKSYVFCLPDPYGCSCATGWKGLQCNEACHPGFYGPDCKLRCSCNNGEMCDRFQGCLCSPGWQGLQCEREGIQRMTPKIVDLPDHIEVNSGKFNPICKASGWPLPTNEEMTLVKPDGTVLHPKDFNHTDHFSVAIFTIHRILPPDSGVWVCSVNTVAGMVEKPFNISVKVLPKPLNAPNVIDTGHNFAVINISSEPYFGDGPIKSKKLLYKPVNHYEAWQHIQVTNEIVTLNYLEPRTEYELCVQLVRRGEGGEGHPGPVRRFTTASIGLPPPRGLNLLPKSQTTLNLTWQPSSEDDFYVEVERRSVQKSDQQNIKVPGNLTSVLLNNLHPREQYVVRARVNTKAQGEWSEDLTAWTLSDILPPQPENIKISNITHSSAVISWTILDGYSISSITIRYKVQGKNEDQHVDVKIKNATITQYQLKGLEPETAYQVDIFAENNIGSSNPAFSHELVTLPESQAPADLGGGKMLLIAILGSAGMTCLTVLLAFLIILQLKRANVQRRMAQAFQNVREEPAVQFNSGTLALNRKVKNNPDPTIYPVLDWNDIKFQDVIGEGNFGQVLKARIKKDGLRMDAAIKRMKEYASKDDHR

SEQ ID NO: 43 - protein, 444 aa, Homo sapiens
MGPEALSSLLLLLLVASGDADMKGHFDPAKCRYALGMQDRTIPDSDISASSSWSDSTAARHSRLESSDGDGAWCPAGSVFPKEEEYLQVDLQRLHLVALVGTQGRHAGGLGKEFSRSYRLRYSRDGRRWMGWKDRWGQEVISGNEDPEGVVLKDLGPPMVARLVRFYPRADRVMSVCLRVELYGCLWRDGLLSYTAPVGQTMYLSEAVYLNDSTYDGHTVGGLQYGGLGQLADGVVGLDDFRKSQELRVWPGYDYVGWSNHSFSSGYVEMEFEFDRLRAFQAMQVHCNNMHTLGARLPGGVECRFRRGPAMAWEGEPMRHNLGGNLGDPRARAVSVPLGGRVARFLQCRFCPHLPRTASPIMPRLTLLPCRASPGATPMLCLHCPQGQSGMGPPEWISLDLDSASRRSLARASLGRCTCVRSTALKIWLVLISPLMCVRDTLCW

SEQ ID NO: 44 - protein, 166 aa, Homo sapiens
MDTSKAQGELGWLLDPPKDGWSEQQQILNGTPLYMYQDCPMQGRRDTDHWLRSNWIYRGEEASRVHVELQFTVRDCKSFPGGAGPLGCKETFNLLYMESDQDVGIQLRRPLFQKVLLPSMPSGSWCRSLVAPYWVPEKVAETGRGCRGRILKRIWRLKAGHGGLCL

SEQ ID NO: 45 - protein, 90 aa, Homo sapiens
MELAALCRWGLLLALLPPGAASTQVCTGTDMKLRLPASPETHLDMLRHLYQGCQVVQGNLELTYLPTNASLSFLQVRPVGNPARPCLQLG

SEQ ID NO: 46 - protein, 209 aa, Homo sapiens
MMRTPSPIGTPRIGTVTPSKVSRSPRTCVPAAAHLITEKRRPVWEHTVILGAFPCPPAPYWTHPQRMEKKLHAVPAGNTVKFRCPAAGNPTPTIRWLKDGQAFHGENRIGGIRLRHQHWSLVMESVVPSDRGTYTCLVENAVGSIRYNYLLDVLERSPHRPILQAGLPANTTAVVGSDVELLCKVYSDAQPHIQWLKHIVINGSSFGAD

SEQ ID NO: 47 - protein, 479 aa, Homo sapiens
MVSYWDTGVLLCALLSCLLLTGSSSGSKLKDPELSLKGTQHIMQAGQTLHLQCRGEAAHKWSLPEMVSKESERLSITKSACGRNGKQFCSTLTLNTAQANHTGFYSCKYLAVPTSKKKETESAIYIFISDTGRPFVEMYSEIPEIIHMTEGRELVIPCRVTSPNITVTLKKFPLDTLIPDGKRIIWDSRKGFIISNATYKEIGLLTCEATVNGHLYKTNYLTHRQTNTIIDVQISTPRPVKLLRGHTLVLNCTATTPLNTRVQMTWSYPDEKNKRASVRRRIDQSNSHANIFYSVLTIDKMQNKDKGLYTCRVRSGPSFKSVNTSVHIYDKAFITVKHRKQQVLETVAGKRSYRLSMKVKAFPSPEVVWLKDGLPATEKSARYLTRGYSLIIKDVTEEDAGNYTILLSIKQSNVFKNLTATLIVNVKPQIYEKAVSSFPDPALYPLGSRQILTCTAYGIPQPTIKWFWHPCNHNHSEAR

SEQ ID NO: 48 - protein, 217 aa, Homo sapiens
MGTSHPAFLVLGCLLTGLSLILCQLSLPSILPNENEKVVQLNSSFSLRCFGESEVSWQYPMSEEESSDVEIRNEENNSGLFVTVLEVSSASAAHTGLYTCYYNHTQTEENELEGRHIYIYVPDPDVAFVPLGMTDYLVIVEDDDSAIIPCRTTDPETPVTLHNSEGVVPASYDSRQGFNGTFTVGPYICEATVKGKKFQTIPFNVYALKGTCIISFL

SEQ ID NO: 49 - protein, 798 aa, Homo sapiens
MDLILINSLPLVSDAETSLTCIASGWRPHEPITIGRDFEALMNQHQDPLEVTQDVTREWAKKVVWKREKASKINGAYFCEGRVRGEAIRIRTMKMRQQASFLPATLTMTVDKGDNVNISFKKVLIKEEDAVIYKNGSFIHSVPRHEVPDILEVHLPHAQPQDAGVYSARYIGGNLFTSAFTRLIVRRCEAQKWGPECNHLCTACMNNGVCHEDTGECICPPGFMGRTCEKACELHTFGRTCKERCSGQEGCKSYVFCLPDPYGCSCATGWKGLQCNEGIQRMTPKIVDLPDHIEVNSGKFNPICKASGWPLPTNEEMTLVKPDGTVLHPKDFNHTDHFSVAIFTIHRILPPDSGVWVCSVNTVAGMVEKPFNISVKVLPKPLNAPNVIDTGHNFAVINISSEPYFGDGPIKSKKLLYKPVNHYEAWQHIQVTNEIVTLNYLEPRTEYELCVQLVRRGEGGEGHPGPVRRFTTASIGLPPPRGLNLLPKSQTTLNLTWQPSSEDDFYVEVERRSVQKSDQQNIKVPGNLTSVLLNNLHPREQYVVRARVNTKAQGEWSEDLTAWTLSDILPPQPENIKISNITHSSAVISWTILDGYSISSITIRYKVQGKNEDQHVDVKIKNATITQYQLKGLEPETAYQVDIFAENNIGSSNPAFSHELVTLPESQAPADLGGGKMLLIAILGSAGMTCLTVLLAFLIILQLKRANVQRRMAQAFQNVREEPAVQFNSGTLALNRKVKNNPDPTIYPVLDWNDIKFQDVIGEGNFGQVLKARIKKDGLRMDAAIKRMKEYASKDDHR

SEQ ID NO: 50 - protein, 786 aa, Homo sapiens
MVWRVPPFLLPILFLASHVGAAVDLTLLANLRLTDPQRFFLTCVSGEAGAGRGSDAWGPPLLLEKDDRIVRTPPGPPLRLARNGSHQVTLRGFSKPSDLVGVFSCVGGAGARRTRVIYVHNSPGAHLLPDKVTHTVNKGDTAVLSARVHKEKQTDVIWKSNGSYFYTLDWHEAQDGRFLLQLPNVQPPSSGIYSATYLEASPLGSAFFRLIVRGCGAGRWGPGCTKECPGCLHGGVCHDHDGECVCPPGFTGTRCEQACREGRFGQSCQEQCPGISGCRGLTFCLPDPYGCSCGSGWRGSQCQEACAPGHFGADCRLQCQCQNGGTCDRFSGCVCPSGWHGVHCEKSDRIPQILNMASELEFNLETMPRINCAAAGNPFPVRGSIELRKPDGTVLLSTKAIVEPEKTTAEFEVPRLVLADSGFWECRVSTSGGQDSRRFKVNVKVPPVPLAAPRLLTKQSRQLVVSPLVSFSGDGPISTVRLHYRPQDSTMDWSTIVVDPSENVTLMNLRPKTGYSVRVQLSRPGEGGEGAWGPPTLMTTDCPEPLLQPWLEGWHVEGTDRLRVSWSLPLVPGPLVGDGFLLRLWDGTRGQERRENVSSPQARTALLTGLTPGTHYQLDVQLYHCTLLGPASPPAHVLLPPSGPPAPRHLHAQALSDSEIQLTWKHPEALPGPISKYVVEVQVAGGAGDPLWIDVDRPEETSTIIRGLNASTRYLFRMRASIQGLGDWSNTVEESTLGNGLQAEGPVQESRAAEEGLDQQLILAVVGSVSATCLTILAALLTLVCI

SEQ ID NO: 51 - DNA, 984 bp, Homo Sapiens
  CDS (37)...(897): SR005_A11
tgcccccacccccttaggcccgagggatcaggagctatgggaccagaggccctgtcatctttactgctgctgctcttggtggcaagtggagatgctgacatgaagggacattttgatcctgccaagtgccgctatgccctgggcatgcaggaccggaccatcccagacagtgacatctctgcttccagctcctggtcagattccactgccgcccgccacagcaggttggagagcagtgacggggatggggcctggtgccccgcagggtcggtgtttcccaaggaggaggagtacttgcaggtggatctacaacgactgcacctggtggctctggtgggcacccagggacggcatgccgggggcctgggcaaggagttctcccggagctaccggctgcgttactcccgggatggtcgccgctggatgggctggaaggaccgctggggtcaggaggtgatctcaggcaatgaggaccctgagggagtggtgctgaaggaccttgggccccccatggttgcccgactggttcgcttctacccccgggctgaccgggtcatgagcgtctgtctgcgggtagagctctatggctgcctctggagggatggactcctgtcttacaccgcccctgtggggcagacaatgtatttatctgaggccgtgtacctcaacgactccacctatgacggacataccgtgggcggactgcagtatgggggtctgggccagctggcagatggtgtggtggggctggatgactttaggaagagtcaggagctgcgggtctggccaggctatgactatgtgggatggagcaaccacagcttctccagtggctatgtggagatggagtttgagtttgaccggctgagggccttccaggctatgcagatgtggtgaacaattcctctccggcactgggaggcaccttcccgccagccccctggtggccgcctggcccacctcccaccaacttcagcagcttgg

SEQ ID NO: 52 - protein, 286 aa, Homo Sapiens [sequence omitted]

SEQ ID NO: 53 - DNA, 788 bp, Homo Sapiens
  CDS (37)...(768)
tgcccccacccccttaggcccgagggatcaggagctatgggaccagaggccctgtcatctttactgctgctgctcttggtggcaagtggagatgctgacatgaagggacattttgatcctgccaagtgccgctatgccctgggcatgcaggaccggaccatcccagacagtgacatctctgcttccagctcctggtcagattccactgccgcccgccacagcaggttggagagcagtgacggggatggggcctggtgccccgcagggtcggtgtttcccaaggaggaggagtacttgcaggtggatctacaacgactgcacctggtggctctggtgggcacccagggacggcatgccgggggcctgggcaaggagttctcccggagctaccggctgcgttactcccgggatggtcgccgctggatgggctggaaggaccgctggggtcaggaggtgatctcaggcaatgaggaccctgagggagtggtgctgaaggaccttgggccccccatggttgcccgactggttcgcttctacccccgggctgaccgggtcatgagcgtctgtctgcgggtagagctctatggctgcctctggagggactgcagtatgggggtctgggccagctggcagatggtgtggtggggctggatgactttaggaagagtcaggagctgcgggtctggccaggctatgactatgtgggatggagcaaccacagcttctccagtggctatgtggagatggagtttgagtttgaccggctgagggccttccaggctatgcag

SEQ ID NO: 54 - protein, 243 aa, Homo Sapiens
MGPEALSSLLLLLLVASGDADMKGHFDPAKCRYALGMQDRTIPDSDISASSSWSDSTAARHSRLESSDGDGAWCPAGSVFPKEEEYLQVDLQRLHLVALVGTQGRHAGGLGKEFSRSYRLRYSRDGRRWMGWKDRWGQEVISGNEDPEGVVLKDLGPPMVARLVRFYPRADRVMSVCLRVELYGCLWRDCSMGVWASWQMVWWGWMTLGRVRSCGSGQAMTMWDGATTASPVAMWRWSLSLTG

SEQ ID NO: 55 - DNA, 878 bp, Homo Sapiens
  CDS (9)...(695)
gaactgggatgtggagctggaagtgcctcctcttctgggctgtgctggtcacagccacactctgcaccgctaggccgtccccgaccttgcctgaacaagatgctctcccctcctcggaggatgatgatgatgatgatgactcctcttcagaggagaaagaaacagataacaccaaaccaaaccccgtagctccatattggacatccccagaaaagatggaaaagaaattgcatgcagtgccggctgccaagacagtgaagttcaaatgcccttccagtgggaccccaaaccccacactgcgctggttgaaaaatggcaaagaattcaaacctgaccacagaattggaggctacaaggtccgttatgccacctggagcatcataatggactctgtggtgccctctgacaagggcaactacacctgcattgtggagaatgagtacggcagcatcaaccacacataccagctggatgtcgtggagcggtcccctcaccggcccatcctgcaagcagggttgcccgccaacaaaacagtggccctgggtagcaacgtggagttcatgtgtaaggtgtacagtgacccgcagccgcacatccagtggctaaagcacatcgaggtgaatgggagcaagattggcccagacaacctgccttatgtccagatcttgaagccctggaagagaggccggcagtgatgacctcgcccctgtacctggagatcatcatctattgcacaggggccttcctcatctcctgcatggtggggtcggtcatcgtctacaagatgaagagtggtaccaagaagagtgacttccacagccagatggctgtgcacaagctggccaagagcatccctctgcgcagacaggtaacagaaa

SEQ ID NO: 56 - protein, 228 aa, Homo Sapiens
MWSWKCLLFWAVLVTATLCTARPSPTLPEQDALPSSEDDDDDDDSSSEEKETDNTKPNPVAPYWTSPEKMEKKLHAVPAAKTVKFKCPSSGTPNPTLRWLKNGKEFKPDHRIGGYKVRYATWSIIMDSVVPSDKGNYTCIVENEYGSINHTYQLDVVERSPHRPILQAGLPANKTVALGSNVEFMCKVYSDPQPHIQWLKHIEVNGSKIGPDNLPYVQILKPWKRGRQ

SEQ ID NO: 57 - DNA, 1775 bp, Homo Sapiens
  CDS (26)...(1366)
ggtccctgagagctgtgagaaggagatgcggctgctgctggccctgttgggggtcctgctgagtgtgcctgggcctccagtcttgtccctggaggcctctgaggaagtggagcttgagccctgcctggctcccagcctggagcagcaagagcaggagctgacagtagcccttgggcagcctgtgcgtctgtgctgtgggcgggctgagcgtggtggccactggtacaaggagggcagtcgcctggcacctgctggccgtgtacggggctggaggggccgcctagagattgccagcttcctacctgaggatgctggccgctacctctgcctggcacgaggctccatgatcgtcctgcagaatctcaccttgattacaggtgactccttgacctccagcaacgatgatgaggaccccaagtcccatagggacccctcgaataggcacagttacccccagcaagcaccctactggacacacccccagcgcatggagaagaaactgcatgcagtacctgcggggaacaccgtcaagttccgctgtccagctgcaggcaaccccacgcccaccatccgctggcttaaggatggacaggcctttcatggggagaaccgcattggaggcattcggctgcgccatcagcactggagtctcgtgatggagagcgtggtgccctcggaccgcggcacatacacctgcctggtagagaacgctgtgggcagcatccgctataactacctgctagatgtgctggagcggtccccgcaccggcccatcctgcaggccgggctcccggccaacaccacagccgtggtgggcagcgacgtggagctgctgtgcaaggtgtacagcgatgcccagccccacatccagtggctgaagcacatcgtcatcaacggcagcagcttcggagccgacggtttcccctatgtgcaagtcctaaagactgcagacatcaatagctcagaggtggaggtcctgtacctgcggaacgtgtcagccgaggacgcaggcgagtacacctgcctcgcaggcaattccatcggcctctcctaccagtctgcctggctcacggtgctgccaggtgagcacctgaagggccaggagatgctgcgagatgcccctctgggccagcagtgggggctgtggcctgttgggtggtcagtctctgttggcctgtggggtctggcctggggggcagtgtgtggatttgtgggtttgagctgtatgacagcccctctgtgcctctccacacgtggccgtccatgtgaccgtctgctgaggtgtgggtgcctgggactgggcataactacagcttcctccgtgtgtgtccccacatatgttgggagctgggagggactgagttagggtgcacggggcggccagtctcaccactgaccagtttgtctgtctgtgtgtgtccatgtgcgagggcagaggaggaccccacatggaccgcagcagcgcccgaggccaggtatacggacatcatcctgtacgcgtcgggctccctggccttggctgtgctcctgctgctggccgggctgtatcgagggcaggcgctccacggccggcacccccgcccgcccgccactgtgcagaagctctcccgcttccctctggcccgacagttctccctggagtcaggctcttccggcaagtcaagctcatccctggtacgaggcgtgcgtctctcctccagcggccccgccttgctcgccggcctcgtgagtctagatctacctctcgacccactatgggagttcccccgggacag

SEQ ID NO: 58 - protein, 446 aa, Homo Sapiens
MRLLLALLGVLLSVPGPPVLSLEASEEVELEPCLAPSLEQQEQELTVALGQPVRLCCGRAERGGHWYKEGSRLAPAGRVRGWRGRLEIASFLPEDAGRYLCLARGSMIVLQNLTLITGDSLTSSNDDEDPKSHRDPSNRHSYPQQAPYWTHPQRMEKKLHAVPAGNTVKFRCPAAGNPTPTIRWLKDGQAFHGENRIGGIRLRHQHWSLVMESVVPSDRGTYTCLVENAVGSIRYNYLLDVLERSPHRPILQAGLPANTTAVVGSDVELLCKVYSDAQPHIQWLKHIVINGSSFGADGFPYVQVLKTADINSSEVEVLYLRNVSAEDAGEYTCLAGNSIGLSYQSAWLTVLPGEHLKGQEMLRDAPLGQQWGLWPVGWSVSVGLWGLAWGAVCGFVGLSCMTAPLCLSTRGRPCDRLLRCGCLGLGITTASSVCVPTYVGSWEGLS

SEQ ID NO: 59 - DNA, 923 bp, Homo Sapiens
  CDS (253)...(777)
gcggacactcctctcggctcctccccggcagcggcggcggctcggagcgggctccggggctcgggtgcagcggccagcgggcgcctggcggcgaggattacccggggaagtggttgtctcctggctggagccgcgagacgggcgctcagggcgcggggccggcggcggcgaacgagaggacggactctggcggccgggtcgttggccgcggggagcgcgggcaccgggcgagcaggccgcgtcgcgctcaccatggtcagctactgggacaccggggtcctgctgtgcgcgctgctcagctgtctgcttctcacaggatctagttcaggttcaaaattaaaagatcctgaactgagtttaaaaggcacccagcacatcatgcaagcaggccagacactgcatctccaatgcaggggggaagcagcccataaatggtctttgcctgaaatggtgagtaaggaaagcgaaaggctgagcataactaaatctgcctgtggaagaaatggcaaacaattctgcagtactttaaccttgaacacagctcaagcaaaccacactggcttctacagctgcaaatatctagctgtacctacttcaaagaagaaggaaacagaatctgcaatctatatatttattagtgatacaggtagacctttcgtagagatgtacagtgaaatccccgaaattatacacatgactgaaggaagggagctcgtcattccctgccgggttacgtcacctaacatcactgttactttaaaaaagaagaaggcataaggagaaagtcagatcatggattattttcttctgtttggactcaccgtgcttgggaatacttctgagcattagagagcacttcattcattgcagagtctctggcctccgaggctgccttcaccatcagcagcttcagcttctgggag

SEQ ID NO: 60 - protein, 174 aa, Homo Sapiens [sequence omitted]

SEQ ID NO: 61 - DNA, 783 bp, Homo Sapiens
  CDS (17)...(700)
cgcgcagcggccggagatgcagcggggcgccgcgctgtgcctgcgactgtggctctgcctgggactcctggacggcctggtgagtggctactccatgacccccccgaccttgaacatcacggaggagtcacacgtcatcgacaccggtgacagcctgtccatctcctgcaggggacagcaccccctcgagtgggcttggccaggagctcaggaggcgccagccaccggagacaaggacagcgaggacacgggggtggtgcgagactgcgagggcacagacgccaggccctactgcaaggtgttgctgctgcacgaggtacatgccaacgacacaggcagctacgtctgctactacaagtacatcaaggcacgcatcgagggcaccacggccgccagctcctacgtgttcgtgagaggaaggacgccatgtgggtgccctgtctggtgtccatccccggcctcaatgtcacgctgcgctcgcaaagctcggtgctgtggccagacgggcaggaggtggtgtgggatgaccggcggggcatgctcgtgtccacgccactgctgcacgatgccctgtacctgcagtgcgagaccacctggggagaccaggacttcctttccaaccccttcctggtgcacatcacaggcaacgagctctatgacatccagctgttgcccaggaagtcgctggagctgctggtaggggagaagctggtcctgaactgcaccgtgtgggctgagtttaactcaggtgtcacctttgactgggactacccagggaagcag

SEQ ID NO: 62 - protein, 227 aa, Homo Sapiens
MQRGAALCLRLWLCLGLLDGLVSGYSMTPPTLNITEESHVIDTGDSLSISCRGQHPLEWAWPGAQEAPATGDKDSEDTGVVRDCEGTDARPYCKVLLLHEVHANDTGSYVCYYKYIKARIEGTTAASSYVFVRGRTPCGCPVWCPSPASMSRCARKARCCGQTGRRWCGMTGGACSCPRHCCTMPCTCSARPPGETRTSFPTPSWCTSQATSSMTSSCCPGSRWSCW

SEQ ID NO: 63 - DNA, 1356 bp, Homo Sapiens
  CDS (16)...(903)
gcgcagcggccggagatgcagcggggcgccgcgctgtgcctgcgactgtggctctgcctgggactcctggacggcctggtgagtggctactccatgacccccccgaccttgaacatcacggaggagtcacacgtcatcgacaccggtgacagcctgtccatctcctgcaggggacagcaccccctcgagtgggcttggccaggagctcaggaggcgccagccaccggagacaaggacagcgaggacacgggggtggtgcgagactgcgagggcacagacgccaggccctactgcaaggtgttgctgctgcacgaggtacatgccaacgacacaggcagctacgtctgctactacaagtacatcaaggcacgcatcgagggcaccacggccgccagctcctacgtgttcgtgagagactttgagcagccattcatcaacaagcctgacacgctcttggtcaacaggaaggacgccatgtgggtgccctgtctggtgtccatccccggcctcaatgtcacgctgcgctcgcaaagctcggtgctgtggccagacgggcaggaggtggtgtgggatgaccggcggggcatgctcgtgtccacgccactgctgcacgatgccctgtacctgcagtgcgagaccacctggggagaccaggacttcctttccaaccccttcctggtgcacatcacaggcaacgagctctatgacatccagctgttgcccaggaagtcgctggagctgctggtaggggagaagctggtcctgaactgcaccgtgtgggctgagtttaactcaggtgtcacctttgactgggactacccagggaagcagaaaatcccttcatcagcgtcgagtggctcaaaggacccatcctggaggccacggcaggagacgagctggtgaagctgcccgtgaagctggcagcgtaccccccgcccgagttccagtggtacaaggatggaaaggcactgtccgggcgccacagtccacatgccctggtgctcaaggaggtgacagaggccagcacaggcacctacaccctcgccctgtggaactccgctgctggcctgaggcgcaacatcagcctggagctggtggtgaatgtgcccccccagatacatgagaaggaggcctcctcccccagcatctactcgcgtcacagccgccaggccctcacctgcacggcctacggggtgcccctgcctctcagcatccagtggcactggcggccctggacaccctgcaagatgtttgcccagcgtagtctccggcggcggcagcagcaagacctcatgccacagtgccgtgactggagggcggtgaccacgcaggatgccgtgaaccccatcgagagcc

SEQ ID NO: 64 - protein, 295 aa, Homo Sapiens
MQRGAALCLRLWLCLGLLDGLVSGYSMTPPTLNITEESHVIDTGDSLSISCRGQHPLEWAWPGAQEAPATGDKDSEDTGVVRDCEGTDARPYCKVLLLHEVHANDTGSYVCYYKYIKARIEGTTAASSYVFVRDFEQPFINKPDTLLVNRKDAMWVPCLVSIPGLNVTLRSQSSVLWPDGQEVVWDDRRGMLVSTPLLHDALYLQCETTWGDQDFLSNPFLVHITGNELYDIQLLPRKSLELLVGEKLVLNCTVWAEFNSGVTFDWDYPGKQKIPSSASSGSKDPSWRPRQETSW

SEQ ID NO: 65 - DNA, 1589 bp, Homo Sapiens
  CDS (29)...(1516)
ggatcctctagggtcccagctcgcctcgatggagctcctcccgccgctgcctcagtccttcctgttgctgctgctgttgcctgccaagcccgcggcgggcgaggactggcagtgcccgcgcaccccctacgcggcctctcgcgactttgacgtgaagtacgtggtgcccagcttctccgccggaggcctggtacaggccatggtgacctacgagggcgacagaaatgagagtgctgtgtttgtagccatacgcaatcgcctgcatgtgcttgggcctgacctgaagtctgtccagagcctggccacgggccctgctggagaccctggctgccagacgtgtgcagcctgtggcccaggaccccacggccctcccggtgacacagacacaaaggtgctggtgctggatcccgcgctgcctgcgctggtcagttgtggctccagcctgcagggccgctgcttcctgcatgacctagagccccaagggacagccgtgcatctggcagcgccagcctgcctcttctcagcccaccataaccggcccgatgactgccccgactgtgtggccagcccattgggcacccgtgtaactgtggttgagcaaggccaggcctcctatttctacgtggcatcctcactggacgcagccgtggctgccagcttcagcccacgctcagtgtctatcaggcgtctcaaggctgacgcctcgggattcgcaccgggctttgtggcgttgtcagtgctgcccaagcatcttgtctcctacagtattgaatacgtgcacagcttccacacgggagccttcgtatacttcctgactgtacagccggccagcgtgacagatgatcctagtgccctgcacacacgcctggcacggcttagcgccactgagccagagttgggtgactatcgggagctggtcctcgactgcagatttgctccaaaacgcaggcgccggggggccccagaaggcggacagccctaccctgtgctgcgggtggcccactccgctccagtgggtgcccaacttgccactgagctgagcatcgccgagggccaggaagtactatttggggtctttgtgactggcaaggatggtggtcctggcgtgggccccaactctgtcgtctgtgccttccccattgacctgctggacacactaattgatgagggtgtggagcgctgttgtgaatccccagtccatccaggcctccggcgaggcctcgacttcttccagtcgcccagtttttgccccaacccgcctggcctggaagccctcagccccaacaccagctgccgccacttccctctgctggtcagtagcagcttctcacgtgtggacctattcaatgggctgttgggaccagtacaggtcactgcattgtatgtgacacgccttgacaacgtcacagtggcacacatgggcacaatggatgggcgtatcctgcaggtgggtcctcatccccacagtcccctagccctgggtccttgtctccatccccattttgctcacatctgacctgtcctaggtggagctggtcaggtcactaaactacttgctgtatgtgtccaacttctcactgggtgacagt

SEQ ID NO: 66 - protein, 495 aa, Homo Sapiens
MELLPPLPQSFLLLLLLPAKPAAGEDWQCPRTPYAASRDFDVKYVVPSFSAGGLVQAMVTYEGDRNESAVFVAIRNRLHVLGPDLKSVQSLATGPAGDPGCQTCAACGPGPHGPPGDTDTKVLVLDPALPALVSCGSSLQGRCFLHDLEPQGTAVHLAAPACLFSAHHNRPDDCPDCVASPLGTRVTVVEQGQASYFYVASSLDAAVAASFSPRSVSIRRLKADASGFAPGFVALSVLPKHLVSYSIEYVHSFHTGAFVYFLTVQPASVTDDPSALHTRLARLSATEPELGDYRELVLDCRFAPKRRRRGAPEGGQPYPVLRVAHSAPVGAQLATELSIAEGQEVLFGVFVTGKDGGPGVGPNSVVCAFPIDLLDTLIDEGVERCCESPVHPGLRRGLDFFQSPSFCPNPPGLEALSPNTSCRHFPLLVSSSFSRVDLFNGLLGPVQVTALYVTRLDNVTVAHMGTMDGRILQVGPHPHSPLALGPCLHPHFAHI

SEQ ID NO: 67 - DNA, 1505 bp, Homo Sapiens
  CDS (41)...(1144)
tgcacatttgtggaaactggatggagagatttggggaagcatggactctttagccagcttagttctctgtggagtcagcttgctcctttctggaactgtggaaggtgccatggacttgatcttgatcaattccctacctcttgtatctgatgctgaaacatctctcacctgcattgcctctgggtggcgcccccatgagcccatcaccataggaagggactttgaagccttaatgaaccagcaccaggatccgctggaagttactcaagatgtgaccagagaatgggctaaaaaagttgtttggaagagagaaaaggctagtaagatcaatggtgcttatttctgtgaagggcgagttcgaggagaggcaatcaggatacgaaccatgaagatgcgtcaacaagcttccttcctaccagctactttaactatgactgtggacaagggagataacgtgaacatatctttcaaaaaggtattgattaaagaagaagatgcagtgatttacaaaaatggttccttcatccattcagtgccccggcatgaagtacctgatattctagaagtacacctgcctcatgctcagccccaggatgctggagtgtactcggccaggtatataggaggaaacctcttcacctcggccttcaccaggctgatagtccggagatgtgaagcccagaagtggggacctgaatgcaaccatctctgtactgcttgtatgaacaatggtgtctgccatgaagatactggagaatgcatttgccctcctgggtttatgggaaggacgtgtgagaaggcttgtgaactgcacacgtttggcagaacttgtaaagaaaggtgcagtggacaagagggatgcaagtcttatgtgttctgtctccctgacccctatgggtgttcctgtgccacaggctggaagggtctgcagtgcaatgaagcatgccaccctggtttttacgggccagattgtaagcttaggtgcagctgcaacaatggggagatgtgtgatcgcttccaaggatgtctctgctctccaggatggcaggggctccagtgtgagagagaaggtaaagcaaggcatacagaggatgaccccaaagatagtggatttgccagatcatatagaagtaaacagtggtaaatttaatcccatttgcaaagcttctggctggccgctacctactaatgaagaaatgaccctggtgaagccggatgggacagtgctccattagccatattcaccatccaccggatcctcccccctgactcaggagtttgggtctgcagtgtgaacacagtggctgggatggtggaaaagcccttcaacatttctgttaaagttcttccaaagcccctgaatgccccaaacgtgattgacactggacataactttgctgtcatcaacatcagctctgagccttactttggggatggaccaatcaaatccaagaagcttctatacaaacccgttaatcactatgaggcttggcaacatattcaag

SEQ ID NO: 68 - protein, 367 aa, Homo Sapiens
MDSLASLVLCGVSLLLSGTVEGAMDLILINSLPLVSDAETSLTCIASGWRPHEPITIGRDFEALMNQHQDPLEVTQDVTREWAKKVVWKREKASKINGAYFCEGRVRGEAIRIRTMKMRQQASFLPATLTMTVDKGDNVNISFKKVLIKEEDAVIYKNGSFIHSVPRHEVPDILEVHLPHAQPQDAGVYSARYIGGNLFTSAFTRLIVRRCEAQKWGPECNHLCTACMNNGVCHEDTGECICPPGFMGRTCEKACELHTFGRTCKERCSGQEGCKSYVFCLPDPYGCSCATGWKGLQCNEACHPGFYGPDCKLRCSCNNGEMCDRFQGCLCSPGWQGLQCEREGKARHTEDDPKDSGFARSYRSKQW

SEQ ID NO: 69 - DNA, 1467 bp, Homo Sapiens
  CDS (41)...(1447)
tgcacatttgtggaaactggatggagagatttggggaagcatggactctttagccagcttagttctctgtggagtcagcttgctcctttctggaactgtggaaggtgccatggacttgatcttgatcaattccctacctcttgtatctgatgctgaaacatctctcacctgcattgcctctgggtggcgcccccatgagcccatcaccataggaagggactttgaagccttaatgaaccagcaccaggatccgctggaagttactcaagatgtgaccagagaatgggctaaaaaagttgtttggaagagagaaaaggctagtaagatcaatggtgcttatttctgtgaagggcgagttcgaggagaggcaatcaggatacgaaccatgaagatgcgtcaacaagcttccttcctaccagctactttaactatgactgtggacaagggagataacgtgaacatatctttcaaaaaggtattgattaaagaagaagatgcagtgatttacaaaaatggttccttcatccattcagtgccccggcatgaagtacctgatattctagaagtacacctgcctcatgctcagccccaggatgctggagtgtactcggccaggtatataggaggaaacctcttcacctcggccttcaccaggctgatagtccggagatgtgaagcccagaagtggggacctgaatgcaaccatctctgtactgcttgtatgaacaatggtgtctgccatgaagatactggagaatgcatttgccctcctgggtttatgggaaggacgtgtgagaaggcttgtgaactgcacacgtttggcagaacttgtaaagaaaggtgcagtggacaagagggatgcaagtcttatgtgttctgtctccctgacccctatgggtgttcctgtgccacaggctggaagggtctgcagtgcaatgaaggcatacagaggatgaccccaaagatagtggatttgccagatcatatagaagtaaacagtggtaaatttaatcccatttgcaaagcttctggctggccgctacctactaatgaagaaatgaccctggtgaagccggatgggacagtgctccatccaaaagactttaaccatacggatcatttctcagtagccatattcaccatccaccggatcctcccccctgactcaggagtttgggtctgcagtgtgaacacagtggctgggatggtggaaaagcccttcaacatttctgttaaagttcttccaaagcccctgaatgccccaaacgtgattgacactggacataactttgctgtcatcaacatcagctctgagccttactttggggatggaccaatcaaatccaagaagcttctatacaaacccgttaatcactatgaggcttggcaacatattcaagtatccatggagaaacagaggctgactaaagcaaatagtgacaaatgagattgttacactcaactatt

SEQ ID NO: 70 - protein, 468 aa, Homo Sapiens
MDSLASLVLCGVSLLLSGTVEGAMDLILINSLPLVSDAETSLTCIASGWRPHEPITIGRDFEALMNQHQDPLEVTQDVTREWAKKVVWKREKASKINGAYFCEGRVRGEAIRIRTMKMRQQASFLPATLTMTVDKGDNVNISFKKVLIKEEDAVIYKNGSFIHSVPRHEVPDILEVHLPHAQPQDAGVYSARYIGGNLFTSAFTRLIVRRCEAQKWGPECNHLCTACMNNGVCHEDTGECICPPGFMGRTCEKACELHTFGRTCKERCSGQEGCKSYVFCLPDPYGCSCATGWKGLQCNEGIQRMTPKIVDLPDHIEVNSGKFNPICKASGWPLPTNEEMTLVKPDGTVLHPKDFNHTDHFSVAIFTIHRILPPDSGVWVCSVNTVAGMVEKPFNISVKVLPKPLNAPNVIDTGHNFAVINISSEPYFGDGPIKSKKLLYKPVNHYEAWQHIQVSMEKQRLTKANSDK

SEQ ID NO: 71 - DNA, 934 bp, Homo Sapiens
  CDS (17)...(772)
ggtcggcctctggagtatggtctggcgggtgccccctttcttgctccccatcctcttcttggcttctcatgtgggcgcggcggtggacctgacgctgctggccaacctgcggctcacggacccccagcgcttcttcctgacttgcgtgtctggggaggccggggcggggaggggctcggacgcctggggcccgcccctgctgctggagaaggacgaccgtatcgtgcgcaccccgcccgggccacccctgcgcctggcgcgcaacggttcgcaccaggtcacgcttcgcggcttctccaagccctcggacctcgtgggcgtcttctcctgcgtgggcggtgctggggcgcggcgcacgcgcgtcatctacgtgcacaacagccctggagcccacctgcttccagacaaggtcacacacactgtgaacaaaggtgacaccgctgtactttctgcacgtgtgcacaaggagaagcagacagacgtgatctggaagagcaacggatcctacttctacaccctggactggcatgaagcccaggatgggcggttcctgctgcagctcccaaatgtgcagccaccatcgagcggcatctacagtgccacttacctggaagccagccccctgggcagcgccttctttcggctcatcgtgcggggtcagaggcagagggcagaggttgtgggtagggtgggaggctgggagccctatgggtacttcctgtgggtcccctggagcccctggatctccagtcctcagtggtcaggtgggtgagggtcagctgctgaagacaccttcctccaggttgtggggctgggcgctgggggccaggctgtaccaaggagtgcccaggttgcctacatggaggtgtctgccacgaccatgacggcgaatgtgtatgcccccctggcttcactggcacccgctgtgaacagg

SEQ ID NO: 72 - protein, 251 aa, Homo Sapiens
MVWRVPPFLLPILFLASHVGAAVDLTLLANLRLTDPQRFFLTCVSGEAGAGRGSDAWGPPLLLEKDDRIVRTPPGPPLRLARNGSHQVTLRGFSKPSDLVGVFSCVGGAGARRTRVIYVHNSPGAHLLPDKVTHTVNKGDTAVLSARVHKEKQTDVIWKSNGSYFYTLDWHEAQDGRFLLQLPNVQPPSSGIYSATYLEASPLGSAFFRLIVRGQRQRAEVVGRVGGWEPYGYFLWVPWSPWISSPQWSGG

SEQ ID NO: 73 - DNA, 1619 bp, Homo Sapiens
  CDS (14)...(1153)
cggcctctggagtatggtctggcgggtgccccctttcttgctccccatcctcttcttggcttctcatgtgggcgcggcggtggacctgacgctgctggccaacctgcggctcacggacccccagcgcttcttcctgacttgcgtgtctggggaggccggggcggggaggggctcggacgcctggggcccgcccctgctgctggagaaggacgaccgtatcgtgcgcaccccgcccgggccacccctgcgcctggcgcgcaacggttcgcaccaggtcacgcttcgcggcttctccaagccctcggacctcgtgggcgtcttctcctgcgtgggcggtgctggggcgcggcgcacgcgcgtcatctacgtgcacaacagccctggagcccacctgcttccagacaaggtcacacacactgtgaacaaaggtgacaccgctgtactttctgcacgtgtgcacaaggagaagcagacagacgtgatctggaagagcaacggatcctacttctacaccctggactggcatgaagcccaggatgggcggttcctgctgcagctcccaaatgtgcagccaccatcgagcggcatctacagtgccacttacctggaagccagccccctgggcagcgccttctttcggctcatcgtgcggggttgtggggctgggcgctgggggccaggctgtaccaaggagtgcccaggttgcctacatggaggtgtctgccacgaccatgacggcgaatgtgtatgcccccctggcttcactggcacccgctgtgaacaggcctgcagagagggccgttttgggcagagctgccaggagcagtgcccaggcatatcaggctgccggggcctcaccttctgcctcccagacccctatggctgctcttgtggatctggctggagaggaagccagtgccaagaagcttgtgcccctggtcattttggggctgattgccgactccagtgccagtgtcagaatggtggcacttgtgaccggttcagtggttgtgtctgcccctctgggtggcatggagtgcactgtgagaagtcaggctggagggactgggtagatacctccactgagaaacagaacacggatgaggggcgctttggtggtcacgtgtctgcccctgtgggagctccaggatgagtgtcctttctccccagaccggatcccccagatcctcaacatggcctcagaactggagttcaacttagagacgatgccccggatcaactgtgcagctgcagggaaccccttccccgtgcggggcagcatagagctacgcaagccagacggcactgtgctcctgtccaccaaggccattgtggagccagagaagaccacagctgagttcgaggtgccccgcttggttcttgcggacagtgggttctgggagtgccgtgtgtccacatctggcggccaagacagccggcgcttcaaggtcaatgtgaaagtgccccccgtgcccctggctgcacctcggctcctgaccaagcagagccgccagcttgtggtctccccgctggtctcgttctctggggatggacccatctccactgtccgcctgcactaccggccccaggacagtaccatggactggtcgaccattgtg

SEQ ID NO: 74 - protein, 379 aa, Homo Sapiens
MVWRVPPFLLPILFLASHVGAAVDLTLLANLRLTDPQRFFLTCVSGEAGAGRGSDAWGPPLLLEKDDRIVRTPPGPPLRLARNGSHQVTLRGFSKPSDLVGVFSCVGGAGARRTRVIYVHNSPGAHLLPDKVTHTVNKGDTAVLSARVHKEKQTDVIWKSNGSYFYTLDWHEAQDGRFLLQLPNVQPPSSGIYSATYLEASPLGSAFFRLIVRGCGAGRWGPGCTKECPGCLHGGVCHDHDGECVCPPGFTGTRCEQACREGRFGQSCQEQCPGISGCRGLTFCLPDPYGCSCGSGWRGSQCQEACAPGHFGADCRLQCQCQNGGTCDRFSGCVCPSGWHGVHCEKSGWRDWVDTSTEKQNTDEGRFGGHVSAPVGAPG

SEQ ID NO: 75 - DNA, 740 bp, Homo Sapiens
  CDS (34)...(519)
tcgtcctggctggcctgggtcggcctctggagtatggtctggcgggtgccccctttcttgctccccatcctcttcttggcttctcatgtgggcgcggcggtggacctgacgctgctggccaacctgcggctcacggacccccagcgcttcttcctgacttgcgtgtctggggaggccggggcggggaggggctcggacgcctggggcccgcccctgctgctggagaaggacgaccgtatcgtgcgcaccccgcccgggccacccctgcgcctggcgcgcaacggttcgcaccaggtcacgcttcgcggcttctccaagccctcggacctcgtgggcgtcttctcctgcgtgggcggtgctggggcgcggcgcacgcgcgtcatctacgtgcacaacagccctggaggtgagttaggcaggcggggggatggcgcggggaaaaccaggccgctgacccaccttccaccccgcagcccacctgcttccagacaaggtcacacacactgtgaacaaaggtgacaccgctgtactttctgcacgtgtgcacaaggagaagcagacagacgtgatctggaagagcaacggatcctacttctacaccctggactggcatgaagcccaggatgggcggttcctgctgcagctcccaaatgtgcagccaccatcgagcggcatctacagtgccacttacctggaagccagccccctgggcagcgccttctttcggctcatcgtgcggg

SEQ ID NO: 76 - protein, 161 aa, Homo Sapiens
MVWRVPPFLLPILFLASHVGAAVDLTLLANLRLTDPQRFFLTCVSGEAGAGRGSDAWGPPLLLEKDDRIVRTPPGPPLRLARNGSHQVTLRGFSKPSDLVGVFSCVGGAGARRTRVIYVHNSPGGELGRRGDGAGKTRPLTHLPPRSPPASRQGHTHCEQR

SEQ ID NO: 77 - DNA, 1761 bp, Homo Sapiens
  CDS (14)...(1258)
cggcctctggagtatggtctggcgggtgccccctttcttgctccccatcctcttcttggcttctcatgtgggcgcggcggtggacctgacgctgctggccaacctgcggctcacggacccccagcgcttcttcctgacttgcgtgtctggggaggccggggcggggaggggctcggacgcctggggcccgcccctgctgctggagaaggacgaccgtatcgtgcgcaccccgcccgggccacccctgcgcctggcgcgcaacggttcgcaccaggtcacgcttcgcggcttctccaagccctcggacctcgtgggcgtcttctcctgcgtgggcggtgctggggcgcggcgcacgcgcgtcatctacgtgcacaacagccctggagcccacctgcttccagacaaggtcacacacactgtgaacaaaggtgacaccgctgtactttctgcacgtgtgcacaaggagaagcagacagacgtgatctggaagagcaacggatcctacttctacaccctggactggcatgaagcccaggatgggcggttcctgctgcagctcccaaatgtgcagccaccatcgagcggcatctacagtgccacttacctggaagccagccccctgggcagcgccttctttcggctcatcgtgcggggttgtggggctgggcgctgggggccaggctgtaccaaggagtgcccaggttgcctacatggaggtgtctgccacgaccatgacggcgaatgtgtatgcccccctggcttcactggcacccgctgtgaacaggcctgcagagagggccgttttgggcagagctgccaggagcagtgcccaggcatatcaggctgccggggcctcaccttctgcctcccagacccctatggctgctcttgtggatctggctggagaggaagccagtgccaagaagcttgtgcccctggtcattttggggctgattgccgactccagtgccagtgtcagaatggtggcacttgtgaccggttcagtggttgtgtctgcccctctgggtggcatggagtgcactgtgagaagtcagaccggatcccccagatcctcaacatggcctcagaactggagttcaacttagagacgatgccccggatcaactgtgcagctgcagggaaccccttccccgtgcggggcagcatagagctacgcaagccagacggcactgtgctcctggtcagcccccaatcaccccaacccaccagcccctcaggccgcctgcttcacagctgatccctaagaccccctagtccctcagaactttctgcagggcccacccattggcctgaccattgctcacatgaggtcaggctgattggtgagggggctgccactgggcctctgtcctgccatcagtccagacggacacctgggtgcctgccacagaggtgcccgttccctgtgacctgtccccttcccccatctcttttagtccaccaaggccattgtggagccagagaagaccacagctgagttcgaggtgccccgcttggttcttgcggacagtgggttctgggagtgccgtgtgtccacatctggcggccaagacagccggcgcttcaaggtcaatgtgaaagtgccccccgtgcccctggctgcacctcggctcctgaccaagcagagccgccagcttgtggtctccccgctggtctcgttctctggggatggacccatctccactgtccgcctgcactaccggccccaggacagtaccatggactggtcgaccattgtgg

SEQ ID NO: 78 - protein, 414 aa, Homo Sapiens
MVWRVPPFLLPILFLASHVGAAVDLTLLANLRLTDPQRFFLTCVSGEAGAGRGSDAWGPPLLLEKDDRIVRTPPGPPLRLARNGSHQVTLRGFSKPSDLVGVFSCVGGAGARRTRVIYVHNSPGAHLLPDKVTHTVNKGDTAVLSARVHKEKQTDVIWKSNGSYFYTLDWHEAQDGRFLLQLPNVQPPSSGIYSATYLEASPLGSAFFRLIVRGCGAGRWGPGCTKECPGCLHGGVCHDHDGECVCPPGFTGTRCEQACREGRFGQSCQEQCPGISGCRGLTFCLPDPYGCSCGSGWRGSQCQEACAPGHFGADCRLQCQCQNGGTCDRFSGCVCPSGWHGVHCEKSDRIPQILNMASELEFNLETMPRINCAAAGNPFPVRGSIELRKPDGTVLLVSPQSPQPTSPSGRLLHS

SEQ ID NO: 79 - DNA, 1230 bp, Homo Sapiens
  CDS (14)...(967)
cggcctctggagtatggtctggcgggtgccccctttcttgctccccatcctcttcttggcttctcatgtgggcgcggcggtggacctgacgctgctggccaacctgcggctcacggacccccagcgcttcttcctgacttgcgtgtctggggaggccggggcggggaggggctcggacgcctggggcccgcccctgctgctggagaaggacgaccgtatcgtgcgcaccccgcccgggccacccctgcgcctggcgcgcaacggttcgcaccaggtcacgcttcgcggcttctccaagccctcggacctcgtgggcgtcttctcctgcgtgggcggtgctggggcgcggcgcacgcgcgtcatctacgtgcacaacagccctggagcccacctgcttccagacaaggtcacacacactgtgaacaaaggtgacaccgctgtactttctgcacgtgtgcacaaggagaagcagacagacgtgatctggaagagcaacggatcctacttctacaccctggactggcatgaagcccaggatgggcggttcctgctgcagctcccaaatgtgcagccaccatcgagcggcatctacagtgccacttacctggaagccagccccctgggcagcgccttctttcggctcatcgtgcggggttgtggggctgggcgctgggggccaggctgtaccaaggagtgcccaggttgcctacatggaggtgtctgccacgaccatgacggcgaatgtgtatgcccccctggcttcactggcacccgctgtgaacaggcctgcagagagggccgttttgggcagagctgccaggagcagtgcccaggcatatcaggctgccggggcctcaccttctgcctcccagacccctatggctgctcttgtggatctggctggagaggaagccagtgccaagaagtccaccaaggccattgtggagccagagaagaccacagctgagttcgaggtgccccgcttggttcttgcggacagtgggttctgggagtgccgtgtgtccacatctggcggccaagacagccggcgcttcaaggtcaatgtgaaagtgccccccgtgcccctggctgcacctcggctcctgaccaagcagagccgccagcttgtggtctccccgctggtctcgttctctggggatggacccatctccactgtccgcctgcactaccggccccaggacagtaccatggactggtcgaccattgtgg

SEQ ID NO: 80 - protein, 317 aa, Homo Sapiens
MVWRVPPFLLPILFLASHVGAAVDLTLLANLRLTDPQRFFLTCVSGEAGAGRGSDAWGPPLLLEKDDRIVRTPPGPPLRLARNGSHQVTLRGFSKPSDLVGVFSCVGGAGARRTRVIYVHNSPGAHLLPDKVTHTVNKGDTAVLSARVHKEKQTDVIWKSNGSYFYTLDWHEAQDGRFLLQLPNVQPPSSGIYSATYLEASPLGSAFFRLIVRGCGAGRWGPGCTKECPGCLHGGVCHDHDGECVCPPGFTGTRCEQACREGRFGQSCQEQCPGISGCRGLTFCLPDPYGCSCGSGWRGSQCQEVHQGHCGAREDHS

SEQ ID NO: 81 - DNA, 1331 bp, Homo Sapiens
  CDS (24)...(944)
cctgccacttccccaccgaggccatgggcccaggagttctgctgctcctgctggtggccacagcttggcatggtcagggaatcccagtgatagagcccagtgtccctgagctggtcgtgaagccaggagcaacggtgaccttgcgatgtgtgggcaatggcagcgtggaatgggatggccccccatcacctcactggaccctgtactctgatggctccagcagcatcctcagcaccaacaacgctaccttccaaaacacggggacctatcgctgcactgagcctggagaccccctgggaggcagcgccgccatccacctctatgtcaaagaccctgcccggccctggaacgtgctagcacaggaggtggtcgtgttcgaggaccaggacgcactactgccctgtctgctcacagacccggtgctggaagcaggcgtctcgctggtgcgtgtgcgtggccggcccctcatgcgccacaccaactactccttctcgccctggcatggcttcaccatccacagggccaagttcattcagagccaggactatcaatgcagtgccctgatgggtggcaggaaggtgatgtccatcagcatccggctgaaagtgcagaaagtcatcccagggcccccagccttgacactggtgcctgcagagctggtgcggattcgaggggaggctgcccagatcgtgtgctcagccagcagcgttgatgttaactttgatgtcttcctccaacacaacaacaccaagctcgcaatccctcaacaatctgactttcataataaccgttaccaaaaagtcctgaccctcaacctcgatcaagtagatttccaacatgccggcaactactcctgcgtggccagcaacgtgcagggcaagcactccacctccatgttcttccgggtggtaggcacaccttcaccctctctctgccccgcctgaagccctctgaggctggccgctactccttcctggccagaaacccaggaggctggagagctctgacgtttgagctcacccttcgataccccccagaggtaagcgtcatatggacattcatcaacggctctggcacccttttgtgtgctgcctctgggtacccccagcccaacgtgacatggctgcagtgcagtggccacactgataggtgtgatgaggcccaagtgctgcaggtctgggatgacccataccctgaggtcctgagccaggagcccttccacaaggtgacggtgcagagcctgctgactgttgagaccttagagcacaaccaaacctacgagtgcagggcccacaacagcgtggggagtggctcctgggccttcataccca

SEQ ID NO: 82 - protein, 306 aa, Homo Sapiens
MGPGVLLLLLVATAWHGQGIPVIEPSVPELVVKPGATVTLRCVGNGSVEWDGPPSPHWTLYSDGSSSILSTNNATFQNTGTYRCTEPGDPLGGSAAIHLYVKDPARPWNVLAQEVVVFEDQDALLPCLLTDPVLEAGVSLVRVRGRPLMRHTNYSFSPWHGFTIHRAKFIQSQDYQCSALMGGRKVMSISIRLKVQKVIPGPPALTLVPAELVRIRGEAAQIVCSASSVDVNFDVFLQHNNTKLAIPQQSDFHNNRYQKVLTLNLDQVDFQHAGNYSCVASNVQGKHSTSMFFRVVGTPSPSLCPA

SEQ ID NO: 83 - DNA, 1508 bp, Homo Sapiens
  CDS (7)...(1017)
gacaccatgcggcttccgggtgcgatgccagctctggccctcaaaggcgagctgctgttgctgtctctcctgttacttctggaaccacagatctctcagggcctggtcgtcacacccccggggccagagcttgtcctcaatgtctccagcaccttcgttctgacctgctcgggttcagctccggtggtgtgggaacggatgtcccaggagcccccacaggaaatggccaaggcccaggatggcaccttctccagcgtgctcacactgaccaacctcactgggctagacacgggagaatacttttgcacccacaatgactcccgtggactggagaccgatgagcggaaacggctctacatctttgtgccagatcccaccgtgggcttcctccctaatgatgccgaggaactattcatctttctcacggaaataactgagatcaccattccatgccgagtaacagacccacagctggtggtgacactgcacgagaagaaaggggacgttgcactgcctgtcccctatgatcaccaacgtggcttttctggtatctttgaggacagaagctacatctgcaaaaccaccattggggacagggaggtggattctgatgcctactatgtctacagactccaggtgtcatccatcaacgtctctgtgaacgcagtgcagactgtggtccgccagggtgagaacatcaccctcatgtgcattgtgatcgggaatgaggtggtcaacttcgagtggacatacccccgcaaagaaagtgggcggctggtggagccggtgactgacttcctcttggatatgccttaccacatccgctccatcctgcacatccccagtgccgagttagaagactcggggacctacacctgcaatgtgacggagagtgtgaatgaccatcaggatgaaaaggccatcaacatcaccgtgagagcggctacgtgcggctcctgggagaggtgggcacactacaatttgctgagctgcatcggagccggacactgcaggtagtgttcgaggcctacccaccgcccactgtcctgtggttcaaagacaaccgcaccctgggcgactccagcgctggcgaaatcgccctgtccacgcgcaacgtgtcggagacccggtatgtgtcagagctgacactggttcgcgtgaaggtggcagaggctggccactacaccatgcgggccttccatgaggatgctgaggtccagctctccttccagctacagatcaatgtccctgtccgagtgctggagctaagtgagagccaccctgacagtggggaacagacagtccgctgtcgtggccggggcatgccccagccgaacatcatctggtctgcctgcagagacctcaaaaggtgtccacgtgagctgccgcccacgctgctggggaacagttccgaagaggagagccagctggagactaacgtgacgtactgggaggaggagcaggagtttgaggtggtgagcacactgcgtctgcagcacgtggatcgg

SEQ ID NO: 84 - protein, 336 aa, Homo Sapiens
MRLPGAMPALALKGELLLLSLLLLLEPQISQGLVVTPPGPELVLNVSSTFVLTCSGSAPVVWERMSQEPPQEMAKAQDGTFSSVLTLTNLTGLDTGEYFCTHNDSRGLETDERKRLYIFVPDPTVGFLPNDAEELFIFLTEITEITIPCRVTDPQLVVTLHEKKGDVALPVPYDHQRGFSGIFEDRSYICKTTIGDREVDSDAYYVYRLQVSSINVSVNAVQTVVRQGENITLMCIVIGNEVVNFEWTYPRKESGRLVEPVTDFLLDMPYHIRSILHIPSAELEDSGTYTCNVTESVNDHQDEKAINITVRAATCGSWERWAHYNLLSCIGAGHCR

SEQ ID NO: 85 - DNA, 1683 bp, Homo Sapiens
  CDS (20)...(1444)
caggtcccggcccggagctatggagcggcgctggcccctggggctagggctggtgctgctgctctgcgccccgctgcccccgggggcgcgcgccaaggaagttactctgatggacacaagcaaggcacagggagagctgggctggctgctggatcccccaaaagatgggtggagtgaacagcaacagatactgaatgggacacccctgtacatgtaccaggactgcccaatgcaaggacgcagagacactgaccactggcttcgctccaattggatctaccgcggggaggaggcttcccgcgtccacgtggagctgcagttcaccgtgcgggactgcaagagtttccctgggggagccgggcctctgggctgcaaggagaccttcaaccttctgtacatggagagtgaccaggatgtgggcattcagctccgacggcccttgttccagaaggtaaccacggtggctgcagaccagagcttcaccattcgagaccttgtgtctggctccgtgaagctgaatgtggagcgctgctctctgggccgcctgacccgccgtggcctctacctcgctttccacaacccgggtgcctgtgtggccctggtgtctgtccgggtcttctaccagcgctgtcctgagaccctgaatggcttggcccaattcccagacactctgcctggccccgctgggttggtggaagtggcggggacctgcttgccccacgcgcgggccagccccaggccctcaggtgcaccccgcatgcactgcagccctgatggcgagtggctggtgcctgtaggacggtgccactgtgagcctggctatgaggaaggtggcagtggcgaagcatgtgttgcctgccctagcggctcctaccggatggacatggacacaccccattgtctcacgtgcccccagcagagcactgctgagtctgagggggccaccatctgtacctgtgagagcggccattacagagctcccggggagggcccccaggtggcatgcacaggtcccccctcggccccccgaaacctgagcttctctgcctcagggactcagctctccctgcgttgggaacccccagcagatacggggggacgccaggatgtcagatacagtgtgaggtgttcccagtgtcagggcacagcacaggacggggggccctgccagccctgtggggtgggcgtgcacttctcgccgggggcccgggggctcaccacacctgcagtgcatgtcaatggccttgaaccttatgccaactacacctttaatgtggaagcccaaaatggagtgtcagggctgggcagctctggccatgccagcacctcagtcagcatcagcatggggcatgcaggtgagaggctgagaggggctgggacagggacctggtggagacagaagggcttaagaccacagaacaaactgatgggcaggaagccatagaaaagttactaaggttatttcctttttccttacatatccaaccttatccctctggacccccagagtcactgtcaggcctgtctctgagactggtgaagaaagaaccgaggcaactagagctgacctgggcggggtcccggccccgaagccctggggcgaacctgacctatgagctgcacgtgctgaaccaggatgaagaacggtaccagatggttctagaacccagggtcttgctgaca

SEQ ID NO: 86 - protein, 474 aa, Homo Sapiens
MERRWPLGLGLVLLLCAPLPPGARAKEVTLMDTSKAQGELGWLLDPPKDGWSEQQQILNGTPLYMYQDCPMQGRRDTDHWLRSNWIYRGEEASRVHVELQFTVRDCKSFPGGAGPLGCKETFNLLYMESDQDVGIQLRRPLFQKVTTVAADQSFTIRDLVSGSVKLNVERCSLGRLTRRGLYLAFHNPGACVALVSVRVFYQRCPETLNGLAQFPDTLPGPAGLVEVAGTCLPHARASPRPSGAPRMHCSPDGEWLVPVGRCHCEPGYEEGGSGEACVACPSGSYRMDMDTPHCLTCPQQSTAESEGATICTCESGHYRAPGEGPQVACTGPPSAPRNLSFSASGTQLSLRWEPPADTGGRQDVRYSVRCSQCQGTAQDGGPCQPCGVGVHFSPGARGLTTPAVHVNGLEPYANYTFNVEAQNGVSGLGSSGHASTSVSISMGHAGERLRGAGTGTWWRQKGLRPQNKLMGRKP

SEQ ID NO: 87 - DNA, 1375 bp, Homo Sapiens
  CDS (20)...(955)
caggtcccggcccggagctatggagcggcgctggcccctggggctagggctggtgctgctgctctgcgccccgctgcccccgggggcgcgcgccaaggaagttactctgatggacacaagcaaggcacagggagagctgggctggctgctggatcccccaaaagatgggtggagtgaacagcaacagatactgaatgggacacccctgtacatgtaccaggactgcccaatgcaaggacgcagagacactgaccactggcttcgctccaattggatctaccgcggggaggaggcttcccgcgtccacgtggagctgcagttcaccgtgcgggactgcaagagtttccctgggggagccgggcctctgggctgcaaggagaccttcaaccttctgtacatggagagtgaccaggatgtgggcattcagctccgacggcccttgttccagaaggtaaccacggtggctgcagaccagagcttcaccattcgagaccttgtgtctggctccgtgaagctgaatgtggagcgctgctctctgggccgcctgacccgccgtggcctctacctcgctttccacaacccgggtgcctgtgtggccctggtgtctgtccgggtcttctaccagcgctgtcctgagaccctgaatggcttggcccaattcccagacactctgcctggccccgctgggttggtggaagtggcggggacctgcttgccccacgcgcgggccagccccaggccctcaggtgcaccccgcatgcactgcagccctgatggcgagtggctggtgcctgtaggacggtgccactgtgagcctggctatgaggaaggtggcagtggcgaagcatgtgttggtaagaacggaggcggtgagaacctgaggaaccactcgggaggattgcaggagtaccccggcagagaaggaggccagtgctccgcctcagtgggtttttaacctgagtgtcccagagcagcggacacacacatgcagagatgtttccagtagaagggattggggcaggaaggggtggtggtggttctgcctgtaaaaacatttacagaaccactgctctgctgcgttctctctccagcctgccctagcggctcctaccggatggacatggacacaccccattgtctcacgtgcccccagcagagcactgctgagtctgagggggccaccatctgtacctgtgagagcggccattacagagctcccggggagggcccccaggtggcatgcacagagtcactgtcaggcctgtctctgagactggtgaagaaagaaccgaggcaactagagctgacctgggcggggtcccggccccgaagccctggggcgaacctgacctatgagctgcacgtgctgaaccag

SEQ ID NO: 88 - protein, 311 aa, Homo Sapiens
MERRWPLGLGLVLLLCAPLPPGARAKEVTLMDTSKAQGELGWLLDPPKDGWSEQQQILNGTPLYMYQDCPMQGRRDTDHWLRSNWIYRGEEASRVHVELQFTVRDCKSFPGGAGPLGCKETFNLLYMESDQDVGIQLRRPLFQKVTTVAADQSFTIRDLVSGSVKLNVERCSLGRLTRRGLYLAFHNPGACVALVSVRVFYQRCPETLNGLAQFPDTLPGPAGLVEVAGTCLPHARASPRPSGAPRMHCSPDGEWLVPVGRCHCEPGYEEGGSGEACVGKNGGGENLRNHSGGLQEYPGREGGQCSASVGF

SEQ ID NO: 89 - DNA, 1511 bp, Homo Sapiens
  CDS (20)...(1492)
caggtcccggcccggagctatggagcggcgctggcccctggggctagggctggtgctgctgctctgcgccccgctgcccccgggggcgcgcgccaaggaagttactctgatggacacaagcaaggcacagggagagctgggctggctgctggatcccccaaaagatgggtggagtgaacagcaacagatactgaatgggacacccctgtacatgtaccaggactgcccaatgcaaggacgcagagacactgaccactggcttcgctccaattggatctaccgcggggaggaggcttcccgcgtccacgtggagctgcagttcaccgtgcgggactgcaagagtttccctgggggagccgggcctctgggctgcaaggagaccttcaaccttctgtacatggagagtgaccaggatgtgggcattcagctccgacggcccttgttccagaaggtaaccacggtggctgcagaccagagcttcaccattcgagaccttgtgtctggctccgtgaagctgaatgtggagcgctgctctctgggccgcctgacccgccgtggcctctacctcgctttccacaacccgggtgcctgtgtggccctggtgtctgtccgggtcttctaccagcgctgtcctgagaccctgaatggcttggcccaattcccagacactctgcctggccccgctgggttggtggaagtggcggggacctgcttgccccacgcgcgggccagccccaggccctcaggtgcaccccgcatgcactgcagccctgatggcgagtggctggtgcctgtaggacggtgccactgtgagcctggctatgaggaaggtggcagtggcgaagcatgtgttgcctgccctagcggctcctaccggatggacatggacacaccccattgtctcacgtgcccccagcagagcactgctgagtctgagggggccaccatctgtacctgtgagagcggccattacagagctcccggggagggcccccaggtggcatgcacaggtcccccctcggccccccgaaacctgagcttctctgcctcagggactcagctctccctgcgttgggaacccccagcagatacggggggacgccaggatgtcagatacagtgtgaggtgttcccagtgtcagggcacagcacaggacggggggccctgccagccctgtggggtgggcgtgcacttctcgccgggggcccgggggctcaccacacctgcagtgcatgtcaatggccttgaaccttatgccaactacacctttaatgtggaagcccaaaatggagtgtcagggctgggcagctctggccatgccagcacctcagtcagcatcagcatggggcatgcagatccaaccttatccctctggacccccagagtcactgtcaggcctgtctctgagactggtgaagaaagaaccgaggcaactagagctgacctgggcggggtcccggccccgaagccctggggcgaacctgacctatgagctgcacgtgctgaaccag

SEQ ID NO: 90 - protein, 490 aa, Homo Sapiens
MERRWPLGLGLVLLLCAPLPPGARAKEVTLMDTSKAQGELGWLLDPPKDGWSEQQQILNGTPLYMYQDCPMQGRRDTDHWLRSNWIYRGEEASRVHVELQFTVRDCKSFPGGAGPLGCKETFNLLYMESDQDVGIQLRRPLFQKVTTVAADQSFTIRDLVSGSVKLNVERCSLGRLTRRGLYLAFHNPGACVALVSVRVFYQRCPETLNGLAQFPDTLPGPAGLVEVAGTCLPHARASPRPSGAPRMHCSPDGEWLVPVGRCHCEPGYEEGGSGEACVACPSGSYRMDMDTPHCLTCPQQSTAESEGATICTCESGHYRAPGEGPQVACTGPPSAPRNLSFSASGTQLSLRWEPPADTGGRQDVRYSVRCSQCQGTAQDGGPCQPCGVGVHFSPGARGLTTPAVHVNGLEPYANYTFNVEAQNGVSGLGSSGHASTSVSISMGHADPTLSLWTPRVTVRPVSETGEERTEATRADLGGVPAPKPWGEPDL

SEQ ID NO: 91 - DNA, 1107 bp, Homo Sapiens
  CDS (20)...(748)
tgcgggccgtcggccggcgatggccctggattatctactactgctcctcctggcatccgcagtggctgcgatggaagaaacgttaatggacaccagaacggctactgcagagctgggctggacggccaatcctgcgtccgggtgggaagaagtcagtggctacgatgaaaacctgaacaccatccgcacctaccaggtgtgcaatgtcttcgagcccaaccagaacaattggctgctcaccaccttcatcaaccggcggggggcccatcgcatctacacagagatgcgcttcactgtgagagactgcagcagcctccctaatgtcccaggatcctgcaaggagaccttcaacttgtattactatgagactgactctgtcattgccaccaagaagtcagccttctggtctgaggccccctacctcaaagtagacaccattgctgcagatgagagcttctcccaggtggactttgggggaaggctgatgaagcttgccctgcagggacattcaaggccagccaggaagctgaaggctgctcccactgcccctccaacagccgctcccctgcagaggcgtctcccatctgcacctgtcggaccggttattaccgagcggactttgaccctccagaagtggcatgcactagcgtcccatcaggtccccgcaatgttatctccatcgtcaatgagacgtccatcattctggagtggcaccctccaagggagacaggtgggcgggatgatgtgacctacaacatcatctgcaaaaagtgccgggcagaccgccggagctgctcccgctgtgacgacaatgtggagtttgtgcccaggcagctgggcctgacggagtgccgcgtctccatcagcagcctgtgggcccacaccccctacacctttgacatccaggccatcaatggagtctccagcaagagtcccttccccccacagcacgtctctgtcaacatcaccacaaaccaagccgccccctccaccgttcccatcatgcaccaagtcagtgccactatgaggagcatcaccttgtcatggccacagccggagcagcccaatggcatcatcctggactatgagatccggtactatgagaag

SEQ ID NO: 92 - protein, 242 aa, Homo Sapiens
MALDYLLLLLLASAVAAMEETLMDTRTATAELGWTANPASGWEEVSGYDENLNTIRTYQVCNVFEPNQNNWLLTTFINRRGAHRIYTEMRFTVRDCSSLPNVPGSCKETFNLYYYETDSVIATKKSAFWSEAPYLKVDTIAADESFSQVDFGGRLMKLALQGHSRPARKLKAAPTAPPTAAPLQRRLPSAPVGPVITERTLTLQKWHALASHQVPAMLSPSSMRRPSFWSGTLQGRQVGGMM

SEQ ID NO: 93 - DNA, 3952 bp, Homo Sapiens
  ref <308>: DATABASE ACCESSION NUMBER: GenBank No. NM013993
  ref <309>: DATABASE ENTRY DATE: 2004-10-28
ggcttaggaagtattaactgatctctgccctagttctcatgtgttaaatatggatagtaatagtatctaccttatgaagtgactgtgaagataaaattatggattctgtttaagggtttaggccagtgtctggcacaggggaagcattctaaaaatatagctgatgctgttaaacaatgactgttgttgttgttttactgttattatccccaaagcggcccattctgtctgttgctgtcagctatgactcagtcccctgattaacttacgcaccacccattttatcccctgcagagatgctgcccccacccccttaggcccgagggatcaggagctatgggaccagaggccctgtcatctttactgctgctgctcttggtggcaagtggagatgctgacatgaagggacattttgatcctgccaagtgccgctatgccctgggcatgcaggaccggaccatcccagacagtgacatctctgcttccagctcctggtcagattccactgccgcccgccacagcaggttggagagcagtgacggggatggggcctggtgccccgcagggtcggtgtttcccaaggaggaggagtacttgcaggtggatctacaacgactgcacctggtggctctggtgggcacccagggacggcatgccgggggcctgggcaaggagttctcccggagctaccggctgcgttactcccgggatggtcgccgctggatgggctggaaggaccgctggggtcaggaggtgatctcaggcaatgaggaccctgagggagtggtgctgaaggaccttgggccccccatggttgcccgactggttcgcttctacccccgggctgaccgggtcatgagcgtctgtctgcgggtagagctctatggctgcctctggagggatggactcctgtcttacaccgcccctgtggggcagacaatgtatttatctgaggccgtgtacctcaacgactccacctatgacggacataccgtgggcggactgcagtatgggggtctgggccagctggcagatggtgtggtggggctggatgactttaggaagagtcaggagctgcgggtctggccaggctatgactatgtgggatggagcaaccacagcttctccagtggctatgtggagatggagtttgagtttgaccggctgagggccttccaggctatgcaggtccactgtaacaacatgcacacgctgggagcccgtctgcctggcggggtggaatgtcgcttccggcgtggccctgccatggcctgggagggggagcccatgcgccacaacctagggggcaacctgggggaccccagagcccgggctgtctcagtgccccttggcggccgtgtggctcgctttctgcagtgccgcttcctctttgcggggccctggttactcttcagcgaaatctccttcatctctgatgtggtgaacaattcctctccggcactgggaggcaccttcccgccagccccctggtggccgcctggcccacctcccaccaacttcagcagcttggagctggagcccagaggccagcagcccgtggccaaggccgaggggagcccgaccgccatcctcatcggctgcctggtggccatcatcctgctcctgctgctcatcattgccctcatgctctggcggctgcactggcgcaggctcctcagcaaggctgaacggagggtgttggaagaggagctgacggttcacctctctgtccctggggacactatcctcatcaacaaccgcccaggtcctagagagccacccccgtaccaggagccccggcctcgtgggaatccgccccactccgctccctgtgtccccaatggctctgcgttgctgctctccaatccagcctaccgcctccttctggccacttacgcccgtccccctcgaggcccgggcccccccacacccgcctgggccaaacccaccaacacccaggcctacagtggggactatatggagcctgagaagccaggcgccccgcttctgcccccacctccccagaacagcgtcccccattatgccgaggctgacattgttaccctgcagggcgtcaccgggggcaacacctatgctgtgcctgcactgcccccaggggcagtcggggatgggccccccagagtggatttccctcgatctcgactccgcttcaaggagaagcttggcgagggccagtttggggaggtgcacctgtgtgaggtcgacagccctcaagatctggttagtcttgatttcccccttaatgtgcgtaagggacaccctttgctggtagctgtcaagatcttacggccagatgccaccaagaatgccaggaatgatttcctgaaagaggtgaagatcatgtcgaggctcaaggacccaaacatcattcggctgctgggcgtgtgtgtgcaggacgaccccctctgcatgattactgactacatggagaacggcgacctcaaccagttcctcagtgcccaccagctggaggacaaggcagccgagggggcccctggggacgggcaggctgcgcaggggcccaccatcagctacccaatgctgctgcatgtggcagcccagatcgcctccggcatgcgctatctggccacactcaactttgtacatcgggacctggccacgcggaactgcctagttggggaaaatttcaccatcaaaatcgcagactttggcatgagccggaacctctatgctggggactattaccgtgtgcagggccgggcagtgctgcccatccgctggatggcctgggagtgcatcctcatggggaagttcacgactgcgagtgacgtgtgggcctttggtgtgaccctgtgggaggtgctgatgctctgtagggcccagccctttgggtcagctcaccgacgagcaggtcatcgagaacgcgggggagttcttccgggaccagggccggcagtgtacctgtcccggccgcctgcctgcccgcagggcctatatgagctgatgcttcggtgctggagccgggagtctgagcagcgaccacccttttcccagctgcatcggttcctggcagaggatgcactcaacacggtgtgaatcacacatccagctgcccctccctcagggagcgatccaggggaagccagtgacactaaaacaagaggacacaatggcacctctgcccttcccctcccgacagcccatcacctctaatagaggcagtgagactgcaggtgggctgggcccacccagggagctgatgccccttctccccttcctggacacactctcatgtccccttcctgttcttccttcctagaagcccccctgtcgcccacccagctggtcctgtggatgggatcctctccaccctcctctagccatcccttggggaagggtggggagaaatataggatagacactggacatggcccattggagcacctgggccccactggacaacactgattcctggagaggtggctgcgcccccagcttctctctccctgtcacacactggaccccactggctgagaatctgggggtgaggaggacaagaaggagaggaaaatgtttccttgtgcctgctcctgtacttgtcctcagcttgggcttcttcctcctccatcacctgaaacactggacctgggggtagccccgccccagccctcagtcacccccacttcccacttgcagtcttgtagctagaacttctctaagcctatacgtttctgtggagtaaatattgggattggggggaaagagggagcaacggcccatagccttggggttggacatctctagtgtagctgccacattgatttttctataatcacttggggtttgtacatttttggggggagagacacagatttttacactaatatatggacctagcttgaggcaattttaatcccctgcactaggcaggtaataataaaggttgagttttccacaaaaaaaaaaaaaa

SEQ ID NO: 94 - DNA, 5777 bp, Homo Sapiens
  ref <308>: DATABASE ACCESSION NUMBER: GenBank No. NM002019
  ref <309>: DATABASE ENTRY DATE: 2004-10-28
gcggacactcctctcggctcctccccggcagcggcggcggctcggagcgggctccggggctcgggtgcagcggccagcgggcctggcggcgaggattacccggggaagtggttgtctcctggctggagccgcgagacgggcgctcagggcgcggggccggcggcggcgaacgagaggacggactctggcggccgggtcgttggccgggggagcgcgggcaccgggcgagcaggccgcgtcgcgctcaccatggtcagctactgggacaccggggtcctgctgtgcgcgctgctcagctgtctgcttctcacaggatctagttcaggttcaaaattaaaagatcctgaactgagtttaaaaggcacccagcacatcatgcaagcaggccagacactgcatctccaatgcaggggggaagcagcccataaatggtctttgcctgaaatggtgagtaaggaaagcgaaaggctgagcataactaaatctgcctgtggaagaaatggcaaacaattctgcagtactttaaccttgaacacagctcaagcaaaccacactggcttctacagctgcaaatatctagctgtacctacttcaaagaagaaggaaacagaatctgcaatctatatatttattagtgatacaggtagacctttcgtagagatgtacagtgaaatccccgaaattatacacatgactgaaggaagggagctcgtcattccctgccgggttacgtcacctaacatcactgttactttaaaaaagtttccacttgacactttgatccctgatggaaaacgcataatctgggacagtagaaagggcttcatcatatcaaatgcaacgtacaaagaaatagggcttctgacctgtgaagcaacagtcaatgggcatttgtataagacaaactatctcacacatcgacaaaccaatacaatcatagatgtccaaataagcacaccacgcccagtcaaattacttagaggccatactcttgtcctcaattgtactgctaccactcccttgaacacgagagttcaaatgacctggagttaccctgatgaaaaaaataagagagcttccgtaaggcgacgaattgaccaaagcaattcccatgccaacatattctacagtgttcttactattgacaaaatgcagaacaaagacaaaggactttatacttgtcgtgtaaggagtggaccatcattcaaatctgttaacacctcagtgcatatatatgataaagcattcatcactgtgaaacatcgaaaacagcaggtgcttgaaaccgtagctggcaagcggtcttaccggctctctatgaaagtgaaggcatttccctcgccggaagttgtatggttaaaagatgggttacctgcgactgagaaatctgctcgctatttgactcgtggctactcgttaattatcaaggacgtaactgaagaggatgcagggaattatacaatcttgctgagcataaaacagtcaaatgtgtttaaaaacctcactgccactctaattgtcaatgtgaaaccccagatttacgaaaaggccgtgtcatcgtttccagacccggctctctacccactgggcagcagacaaatcctgacttgtaccgcatatggtatccctcaacctacaatcaagtggttctggcacccctgtaaccataatcattccgaagcaaggtgtgacttttgttccaataatgaagagtcctttatcctggatgctgacagcaacatgggaaacagaattgagagcatcactcagcgcatggcaataatagaaggaaagaataagatggctagcaccttggttgtggctgactctagaatttctggaatctacatttgcatagcttccaataaagttgggactgtgggaagaaacataagcttttatatcacagatgtgccaaatgggtttcatgttaacttggaaaaaatgccgacggaaggagaggacctgaaactgtcttgcacagttaacaagttcttatacagagacgttacttggattttactgcggacagttaataacagaacaatgcactacagtattagcaagcaaaaaatggccatcactaaggagcactccatcactcttaatcttaccatcatgaatgtttccctgcaagattcaggcacctatgcctgcagagccaggaatgtatacacaggggaagaaatcctccagaagaaagaaattacaatcagagatcaggaagcaccatacctcctgcgaaacctcagtgatcacacagtggccatcagcagttccaccactttagactgtcatgctaatggtgtccccgagcctcagatcacttggtttaaaaacaaccacaaaatacaacaagagcctggaattattttaggaccaggaagcagcacgctgtttattgaaagagtcacagaagaggatgaaggtgtctatcactgcaaagccaccaaccagaagggctctgtggaaagttcagcatacctcactgttcaaggaacctcggacaagtctaatctggagctgatcactctaacatgcacctgtgtggctgcgactctcttctggctcctattaaccctccttatccgaaaaatgaaaaggtcttcttctgaaataaagactgactacctatcaattataatggacccagatgaagttcctttggatgagcagtgtgagcggctcccttatgatgccagcaagtgggagtttgcccgggagagacttaaactgggcaaatcacttggaagaggggcttttggaaaagtggttcaagcatcagcatttggcattaagaaatcacctacgtgccggactgtggctgtgaaaatgctgaaagagggggccacggccagcgagtacaaagctctgatgactgagctaaaaatcttgacccacattggccaccatctgaacgtggttaacctgctgggagcctgcaccaagcaaggagggcctctgatggtgattgttgaatactgcaaatatggaaatctctccaactacctcaagagcaaacgtgacttattttttctcaacaaggatgcagcactacacatggagcctaagaaagaaaaaatggagccaggcctggaacaaggcaagaaaccaagactagatagcgtcaccagcagcgaaagctttgcgagctccggctttcaggaagataaaagtctgagtgatgttgaggaagaggaggattctgacggtttctacaaggagcccatcactatggaagatctgatttcttacagttttcaagtggccagaggcatggagttcctgtcttccagaaagtgcattcatcgggacctggcagcgagaaacattcttttatctgagaacaacgtggtgaagatttgtgattttggccttgcccgggatatttataagaaccccgattatgtgagaaaaggagatactcgacttcctctgaaatggatggctcccgaatctatctttgacaaaatctacagcaccaagagcgacgtgtggtcttacggagtattgctgtgggaaatcttctccttaggtgggtctccatacccaggagtacaaatggatgaggacttttgcagtcgcctgagggaaggcatgaggatgagagctcctgagtactctactcctgaaatctatcagatcatgctggactgctggcacagagacccaaaagaaaggccaagatttgcagaacttgtggaaaaactaggtgatttgcttcaagcaaatgtacaacaggatggtaaagactacatcccaatcaatgccatactgacaggaaatagtgggtttacatactcaactcctgccttctctgaggacttcttcaaggaaagtatttcagctccgaagtttaattcaggaagctctgatgatgtcagatatgtaaatgctttcaagttcatgagcctggaaagaatcaaaacctttgaagaacttttaccgaatgccacctccatgtttgatgactaccagggcgacagcagcactctgttggcctctcccatgctgaagcgcttcacctggactgacagcaaacccaaggcctcgctcaagattgacttgagagtaaccagtaaaagtaaggagtcggggctgtctgatgtcagcaggcccagtttctgccattccagctgtgggcacgtcagcgaaggcaagcgcaggttcacctacgaccacgctgagctggaaaggaaaatcgcgtgctgctccccgcccccagactacaactcggtggtcctgtactccaccccacccatctagagtttgacacgaagccttatttctagaagcacatgtgtatttatacccccaggaaactagcttttgccagtattatgcatatataagtttacacctttatctttccatgggagccagctgctttttgtgatttttttaatagtgctttttttttttgactaacaagaatgtaactccagatagagaaatagtgacaagtgaagaacactactgctaaatcctcatgttactcagtgttagagaaatccttcctaaacccaatgacttccctgctccaacccccgccacctcagggcacgcaggaccagtttgattgaggagctgcactgatcacccaatgcatcacgtaccccactgggccagccctgcagcccaaaacccagggcaacaagcccgttagccccaggggatcactggctggcctgagcaacatctcgggagtcctctagcaggcctaagacatgtgaggaggaaaaggaaaaaaagcaaaaagcaagggagaaaagagaaaccgggagaaggcatgagaaagaatttgagacgcaccatgtgggcacggagggggacggggctcagcaatgccatttcagtggcttcccagctctgacccttctacatttgagggcccagccaggagcagatggacagcgatgaggggacattttctggattctgggaggcaagaaaaggacaaatatcttttttggaactaaagcaaattttagacctttacctatggaagtggttctatgtccattctcattcgtggcatgttttgatttgtagcactgagggtggcactcaactctgagcccatacttttggctcctctagtaagatgcactgaaaacttagccagagttaggttgtctccaggccatgatggccttacactgaaaatgtcacattctattttgggtattaatatatagtccagacacttaactcaatttcttggtattattctgttttgcacagttagttgtgaaagaaagctgagaagaatgaaaatgcagtcctgaggagagttttctccatatcaaaacgagggctgatggaggaaaaaggtcaataaggtcaagggaagaccccgtctctataccaaccaaaccaattcaccaacacagttgggacccaaaacacaggaagtcagtcacgtttccttttcatttaatggggattccactatctcacactaatctgaaaggatgtggaagagcattagctggcgcatattaagcactttaagctccttgagtaaaaaggtggtatgtaatttatgcaaggtatttctccagttgggactcaggatattagttaatgagccatcactagaagaaaagcccattttcaactgctttgaaacttgcctggggtctgagcatgatgggaatagggagacagggtaggaaagggcgcctactcttcagggtctaaagatcaagtgggccttggatcgctaagctggctctgtttgatgctatttatgcaagttagggtctatgtattta

SEQ ID NO: 95 - DNA, 4450 bp, Homo Sapiens
  ref <308>: DATABASE ACCESSION NUMBER: GenBank No. NM002020
  ref <309>: DATABASE ENTRY DATE: 2004-12-18
acccacgcgcagcggccggagatgcagcggggcgccgcgctgtgcctgcgactgtggctctgcctgggactcctggacggcctggtgagtgactactccatgacccccccgaccttgaacatcacggaggagtcacacgtcatcgacaccggtgacagcctgtccatctcctgcaggggacagcaccccctcgagtgggcttggccaggagctcaggaggcgccagccaccggagacaaggacagcgaggacacgggggtggtgcgagactgcgagggcacagacgccaggccctactgcaaggtgttgctgctgcacgaggtacatgccaacgacacaggcagctacgtctgctactacaagtacatcaaggcacgcatcgagggcaccacggccgccagctcctacgtgttcgtgagagactttgagcagccattcatcaacaagcctgacacgctcttggtcaacaggaaggacgccatgtgggtgccctgtctggtgtccatccccggcctcaatgtcacgctgcgctcgcaaagctcggtgctgtggccagacgggcaggaggtggtgtgggatgaccggcggggcatgctcgtgtccacgccactgctgcacgatgccctgtacctgcagtgcgagaccacctggggagaccaggacttcctttccaaccccttcctggtgcacatcacaggcaacgagctctatgacatccagctgttgcccaggaagtcgctggagctgctggtaggggagaagctggtcctcaactgcaccgtgtgggctgagtttaactcaggtgtcacctttgactgggactacccagggaagcaggcagagcggggtaagtgggtgcccgagcgacgctcccaacagacccacacagaactctccagcatcctgaccatccacaacgtcagccagcacgacctgggctcgtatgtgtgcaaggccaacaacggcatccagcgatttcgggagagcaccgaggtcattgtgcatgaaaatcccttcatcagcgtcgagtggctcaaaggacccatcctggaggccacggcaggagacgagctggtgaagctgcccgtgaagctggcagcgtaccccccgcccgagttccagtggtacaaggatggaaaggcactgtccgggcgccacagtccacatgccctggtgctcaaggaggtgacagaggccagcacaggcacctacaccctcgccctgtggaactccgctgctggcctgaggcgcaacatcagcctggagctggtggtgaatgtgcccccccagatacatgagaaggaggcctcctcccccagcatctactcgcgtcacagccgccaggccctcacctgcacggcctacggggtgcccctgcctctcagcatccagtggcactggcggccctggacaccctgcaagatgtttgcccagcgtagtctccggcggcggcagcagcaagacctcatgccacagtgccgtgactggagggcggtgaccacgcaggatgccgtgaaccccatcgagagcctggacacctggaccgagtttgtggagggaaagaataagactgtgagcaagctggtgatccagaatgccaacgtgtctgccatgtacaagtgtgtggtctccaacaaggtgggccaggatgagcggctcatctacttctatgtgaccaccatccccgacggcttcaccatcgaatccaagccatccgaggagctactagagggccagccggtgctcctgagctgccaagccgacagctacaagtacgagcatctgcgctggtaccgcctcaacctgtccacgctgcacgatgcgcacgggaacccgcttctgctcgactgcaagaacgtgcatctgttcgccacccctctggccgccagcctggaggaggtggcacctggggcgcgccacgccacgctcagcctgagtatcccccgcgtcgcgcccgagcacgagggccactatgtgtgcgaagtgcaagaccggcgcagccatgacaagcactgccacaagaagtacctgtcggtgcaggccctggaagcccctcggctcacgcagaacttgaccgacctcctggtgaacgtgagcgactcgctggagatgcagtgcttggtggccggagcgcacgcgcccagcatcgtgtggtacaaagacgagaggctgctggaggaaaagtctggagtcgacttggcggactccaaccagaagctgagcatccagcgcgtgcgcgaggaggatgcgggaccgtatctgtgcagcgtgtgcagacccaagggctgcgtcaactcctccgccagcgtggccgtggaaggctccgaggataagggcagcatggagatcgtgatccttgtcggtaccggcgtcatcgctgtcttcttctgggtcctcctcctcctcatcttctgtaacatgaggaggccggcccacgcagacatcaagacgggctacctgtccatcatcatggaccccggggaggtgcctctggaggagcaatgcgaatacctgtcctacgatgccagccagtgggaattcccccgagagcggctgcacctggggagagtgctcggctacggcgccttcgggaaggtggtggaagcctccgctttcggcatccacaagggcagcagctgtgacaccgtggccgtgaaaatgctgaaagagggcgccacggccagcgagcagcgcgcgctgatgtcggagctcaagatcctcattcacatcggcaaccacctcaacgtggtcaacctcctcggggcgtgcaccaagccgcagggccccctcatggtgatcgtggagttctgcaagtacggcaacctctccaacttcctgcgcgccaagcgggacgccttcagcccctgcgcggagaagtctcccgagcagcgcggacgcttccgcgccatggtggagctcgccaggctggatcggaggcggccggggagcagcgacagggtcctcttcgcgcggttctcgaagaccgagggcggagcgaggcgggcttctccagaccaagaagctgaggacctgtggctgagcccgctgaccatggaagatcttgtctgctacagcttccaggtggccagagggatggagttcctggcttcccgaaagtgcatccacagagacctggctgctcggaacattctgctgtcggaaagcgacgtggtgaagatctgtgactttggccttgcccgggacatctacaaagaccccgactacgtccgcaagggcagtgcccggctgcccctgaagtggatggcccctgaaagcatcttcgacaaggtgtacaccacgcagagtgacgtgtggtcctttggggtgcttctctgggagatcttctctctgggggcctccccgtaccctggggtgcagatcaatgaggagttctgccagcgcgtgagagacggcacaaggatgagggccccggagctggccactcccgccatacgccacatcatgctgaactgctggtccggagaccccaaggcgagacctgcattctcggacctggtggagatcctgggggacctgctccagggcaggggcctgcaagaggaagaggaggtctgcatggccccgcgcagctctcagagctcagaagagggcagcttctcgcaggtgtccaccatggccctacacatcgcccaggctgacgctgaggacagcccgccaagcctgcagcgccacagcctggccgccaggtattacaactgggtgtcctttcccgggtgcctggccagaggggctgagacccgtggttcctccaggatgaagacatttgaggaattccccatgaccccaacgacctacaaaggctctgtggacaaccagacagacagtgggatggtgctggcctcggaggagtttgagcagatagagagcaggcatagacaagaaagcggcttcaggtagctgaagcagagagagagaaggcagcatacgtcagcattttcttctctgcacttataagaaagatcaaagactttaagactttcgctatttcttctactgctatctactacaaacttcaaagaggaaccaggaggacaagaggagcatgaaagtggacaaggagtgtgaccactgaagcaccacagggaggggttaggcctccggatgactgcgggcaggcctggataatatccagcctcccacaagaagctggtggagcagagtgttccctgactcctccaaggaaagggagacgccctttcatggtctgctgagtaacaggtgccttcccagacactggcgttactgcttgaccaaagagccctcaagcggcccttatgccagcgtgacagagggctcacctcttgccttctaggtcacttctcacaatgtcccttcagcacctgaccctgtgcccgccgattattccttggtaatatgagtaatacatcaaagagtagtattaaaagctaattaatcatgtttataaaaa

SEQ ID NO: 96 - DNA, 4541 bp, Homo Sapiens
  ref <308>: DATABASE ACCESSION NUMBER: GenBank No. NM002447
  ref <309>: DATABASE ENTRY DATE: 2004-10-28
ggatcctctagggtcccagctcgcctcgatggagctcctcccgccgctgcctcagtccttcctgttgctgctgctgttgcctgccaagcccgcggcgggcgaggactggcagtgcccgcgcaccccctacgcggcctctcgcgactttgacgtgaagtacgtggtgcccagcttctccgccggaggcctggtacaggccatggtgacctacgagggcgacagaaatgagagtgctgtgtttgtagccatacgcaatcgcctgcatgtgcttgggcctgacctgaagtctgtccagagcctggccacgggccctgctggagaccctggctgccagacgtgtgcagcctgtggcccaggaccccacggccctcccggtgacacagacacaaaggtgctggtgctggatcccgcgctgcctgcgctggtcagttgtggctccagcctgcagggccgctgcttcctgcatgacctagagccccaagggacagccgtgcatctggcagcgccagcctgcctcttctcagcccaccataaccggcccgatgactgccccgactgtgtggccagcccattgggcacccgtgtaactgtggttgagcaaggccaggcctcctatttctacgtggcatcctcactggacgcagccgtggctggcagcttcagcccacgctcagtgtctatcaggcgtctcaaggctgacgcctcgggattcgcaccgggctttgtggcgttgtcagtgctgcccaagcatcttgtctcctacagtattgaatacgtgcacagcttccacacgggagccttcgtatacttcctgactgtacagccggccagcgtgacagatgatcctagtgccctgcacacacgcctggcacggcttagcgccactgagccagagttgggtgactatcgggagctggtcctcgactgcagatttgctccaaaacgcaggcgccggggggccccagaaggcggacagccctaccctgtgctgcaggtggcccactccgctccagtgggtgcccaacttgccactgagctgagcatcgccgagggccaggaagtactatttggggtctttgtgactggcaaggatggtggtcctggcgtgggccccaactctgtcgtctgtgccttccccattgacctgctggacacactaattgatgagggtgtggagcgctgttgtgaatccccagtccatccaggcctccggcgaggcctcgacttcttccagtcgcccagtttttgccccaacccgcctggcctggaagccctcagccccaacaccagctgccgccacttccctctgctggtcagtagcagcttctcacgtgtggacctattcaatgggctgttgggaccagtacaggtcactgcattgtatgtgacacgccttgacaacgtcacagtggcacacatgggcacaatggatgggcgtatcctgcaggtggagctggtcaggtcactaaactacttgctgtatgtgtccaacttctcactgggtgacagtgggcagcccgtgcagcgggatgtcagtcgtcttggggaccacctactctttgcctctggggaccaggttttccaggtacctatccgaggccctggctgccgccacttcctgacctgtgggcgttgcctaagggcatggcatttcatgggctgtggctggtgtgggaacatgtgcggccagcagaaggagtgtcctggctcctggcaacaggaccactgcccacctaagcttactgagttccacccccacagtggacctctaaggggcagtacaaggctgaccctgtgtggctccaacttctaccttcacccttctggtctggtgcctgagggaacccatcaggtcactgtgggccaaagtccctgccggccactgcccaaggacagctcaaaactcagaccagtgccccggaaagactttgtagaggagtttgagtgtgaactggagcccttgggcacccaggcagtggggcctaccaacgtcagcctcaccgtgactaacatgccaccgggcaagcacttccgggtagacggcacctccgtgctgagaggcttctctttcatggagccagtgctgatagcagtgcaacccctctttggcccacgggcaggaggcacctgtctcactcttgaaggccagagtctgtctgtaggcaccagccgggctgtgctggtcaatgggactgagtgtctgctagcacgggtcagtgaggggcagcttttatgtgccacaccccctggggccacggtggccagtgtcccccttagcctgcaggtggggggtgcccaggtacctggttcctggaccttccagtacagagaagaccctgtcgtgctaagcatcagccccaactgtggctacatcaactcccacatcaccatctgtggccagcatctaacttcagcatggcacttagtgctgtcattccatgacgggcttagggcagtggaaagcaggtgtgagaggcagcttccagagcagcagctgtgccgccttcctgaatatgtggtccgagacccccagggatgggtggcagggaatctgagtgcccgaggggatggagctgctggctttacactgcctggctttcgcttcctacccccaccccatccacccagtgccaacctagttccactgaagcctgaggagcatgccattaagtttgagtatattgggctgggcgctgtggctgactgtgtgggtatcaacgtgaccgtgggtggtgagagctgccagcacgagttccggggggacatggttgtctgccccctgcccccatccctgcagcttggccaggatggtgccccattgcaggtctgcgtagatggtgaatgtcatatcctgggtagagtggtgcggccagggccagatggggtcccacagagcacgctccttggtatcctgctgcctttgctgctgcttgtggctgcactggcgactgcactggtcttcagctactggtggcggaggaagcagctagttcttcctcccaacctgaatgacctggcatccctggaccagactgctggagccacacccctgcctattctgtactcgggctctgactacagaagtggccttgcactccctgccattgatggtctggattccaccacttgtgtccatggagcatccttctccgatagtgaagatgaatcctgtgtgccactgctgcggaaagagtccatccagctaagggacctggactctgcgctcttggctgaggtcaaggatgtgctgattccccatgagcgggtggtcacccacagtgaccgagtcattggcaaaggccactttggagttgtctaccacggagaatacatagaccaggcccagaatcgaatccaatgtgccatcaagtcactaagtcgcatcacagagatgcagcaggtggaggccttcctgcgagaggggctgctcatgcgtggcctgaaccacccgaatgtgctggctctcattggtatcatgttgccacctgagggcctgccccatgtgctgctgccctatatgtgccacggtgacctgctccagttcatccgctcacctcagcggaaccccaccgtgaaggacctcatcagctttggcctgcaggtagcccgcggcatggagtacctggcagagcagaagtttgtgcacagggacctggctgcgcggaactgcatgctggacgagtcattcacagtcaaggtggctgactttggtttggcccgcgacatcctggacagggagtactatagtgttcaacagcatcgccacgctcgcctacctgtgaagtggatggcgctggagagcctgcagacctatagatttaccaccaagtctgatgtgtggtcatttggtgtgctgctgtgggaactgctgacacggggtgccccaccataccgccacattgacccttttgaccttacccacttcctggcccagggtcggcgcctgccccagcctgagtattgccctgattctctgtaccaagtgatgcagcaatgctgggaggcagacccagcagtgcgacccaccttcagagtactagtgggggaggtggagcagatagtgtctgcactgcttggggaccattatgtgcagctgccagcaacctacatgaacttgggccccagcacctcgcatgagatgaatgtgcgtccagaacagccgcagttctcacccatgccagggaatgtacgccggccccggccactctcagagcctcctcggcccacttgacttagttcttgggctggacctgcttagctgccttgagctaaccccaaggctgcctctgggccatgccaggccagagcagtggccctccaccttgttcctgccctttaactttcagaggcaataggtaaatgggcccattaggtccctcactccacagagtgagccagtgagggcagtcctgcaacatgtatttatggagtgcctgctgtggaccctgtcttctgggcacagtggactcagcagtgaccacaccaacactgacccttgaaccaataaaggaacaaatgactattaaagcacaaaaaaaaaa

SEQ ID NO: 97 - DNA, 4138 bp, Homo Sapiens
  ref <308>: DATABASE ACCESSION NUMBER: GenBank No. NM000459
  ref <309>: DATABASE ENTRY DATE: 2004-10-26
cttctgtgctgttccttcttgcctctaacttgtaaacaagacgtactaggacgatgctaatggaaagtcacaaaccgctgggtttttgaaaggatccttgggacctcatgcacatttgtggaaactggatggagagatttggggaagcatggactctttagccagcttagttctctgtggagtcagcttgctcctttctggaactgtggaaggtgccatggacttgatcttgatcaattccctacctcttgtatctgatgctgaaacatctctcacctgcattgcctctgggtggcgcccccatgagcccatcaccataggaagggactttgaagccttaatgaaccagcaccaggatccgctggaagttactcaagatgtgaccagagaatgggctaaaaaagttgtttggaagagagaaaaggctagtaagatcaatggtgcttatttctgtgaagggcgagttcgaggagaggcaatcaggatacgaaccatgaagatgcgtcaacaagcttccttcctaccagctactttaactatgactgtggacaagggagataacgtgaacatatctttcaaaaaggtattgattaaagaagaagatgcagtgatttacaaaaatggttccttcatccattcagtgccccggcatgaagtacctgatattctagaagtacacctgcctcatgctcagccccaggatgctggagtgtactcggccaggtatataggaggaaacctcttcacctcggccttcaccaggctgatagtccggagatgtgaagcccagaagtggggacctgaatgcaaccatctctgtactgcttgtatgaacaatggtgtctgccatgaagatactggagaatgcatttgccctcctgggtttatgggaaggacgtgtgagaaggcttgtgaactgcacacgtttggcagaacttgtaaagaaaggtgcagtggacaagagggatgcaagtcttatgtgttctgtctccctgacccctatgggtgttcctgtgccacaggctggaagggtctgcagtgcaatgaagcatgccaccctggtttttacgggccagattgtaagcttaggtgcagctgcaacaatggggagatgtgtgatcgcttccaaggatgtctctgctctccaggatggcaggggctccagtgtgagagagaaggcataccgaggatgaccccaaagatagtggatttgccagatcatatagaagtaaacagtggtaaatttaatcccatttgcaaagcttctggctggccgctacctactaatgaagaaatgaccctggtgaagccggatgggacagtgctccatccaaaagactttaaccatacggatcatttctcagtagccatattcaccatccaccggatcctcccccctgactcaggagtttgggtctgcagtgtgaacacagtggctgggatggtggaaaagcccttcaacatttctgttaaagttcttccaaagcccctgaatgccccaaacgtgattgacactggacataactttgctgtcatcaacatcagctctgagccttactttggggatggaccaatcaaatccaagaagcttctatacaaacccgttaatcactatgaggcttggcaacatattcaagtgacaaatgagattgttacactcaactatttggaacctcggacagaatatgaactctgtgtgcaactggtccgtcgtggagagggtggggaagggcatcctggacctgtgagacgcttcacaacagcttctatcggactccctcctccaagaggtctaaatctcctgcctaaaagtcagaccactctaaatttgacctggcaaccaatatttccaagctcggaagatgacttttatgttgaagtggagagaaggtctgtgcaaaaaagtgatcagcagaatattaaagttccaggcaacttgacttcggtgctacttaacaacttacatcccagggagcagtacgtggtccgagctagagtcaacaccaaggcccagggggaatggagtgaagatctcactgcttggacccttagtgacattcttcctcctcaaccagaaaacatcaagatttccaacattacacactcctcggctgtgatttcttggacaatattggatggctattctatttcttctattactatccgttacaaggttcaaggcaagaatgaagaccagcacgttgatgtgaagataaagaatgccaccatcattcagtatcagctcaagggcctagagcctgaaacagcataccaggtggacatttttgcagagaacaacatagggtcaagcaacccagccttttctcatgaactggtgaccctcccagaatctcaagcaccagcggacctcggaggggggaagatgctgcttatagccatccttggctctgctggaatgacctgcctgactgtgctgttggcctttctgatcatattgcaattgaagagggcaaatgtgcaaaggagaatggcccaagccttccaaaacgtgagggaagaaccagctgtgcagttcaactcagggactctggccctaaacaggaaggtcaaaaacaacccagatcctacaatttatccagtgcttgactggaatgacatcaaatttcaagatgtgattggggagggcaattttggccaagttcttaaggcgcgcatcaagaaggatgggttacggatggatgctgccatcaaaagaatgaaagaatatgcctccaaagatgatcacagggactttgcaggagaactggaagttctttgtaaacttggacaccatccaaacatcatcaatctcttaggagcatgtgaacatcgaggctacttgtacctggccattgagtacgcgccccatggaaaccttctggacttccttcgcaagagccgtgtgctggagacggacccagcatttgccattgccaatagcaccgcgtccacactgtcctcccagcagctccttcacttcgctgccgacgtggcccggggcatggactacttgagccaaaaacagtttatccacagggatctggctgccagaaacattttagttggtgaaaactatgtggcaaaaatagcagattttggattgtcccgaggtcaagaggtgtacgtgaaaaagacaatgggaaggctcccagtgcgctggatggccatcgagtcactgaattacagtgtgtacacaaccaacagtgatgtatggtcctatggtgtgttactatgggagattgttagcttaggaggcacaccctactgcgggatgacttgtgcagaactctacgagaagctgccccagggctacagactggagaagcccctgaactgtgatgatgaggtgtatgatctaatgagacaatgctggcgggagaagccttatgagaggccatcatttgcccagatattggtgtccttaaacagaatgttagaggagcgaaagacctacgtgaataccacgctttatgagaagtttacttatgcaggaattgactgttctgctgaagaagcggcctaggacagaacatctgtataccctctgtttccctttcactggcatgggagacccttgacaactgctgagaaaacatgcctctgccaaaggatgtgatatataagtgtacatatgtgctggaattctaacaagtcataggttaatatttaagacactgaaaaatctaagtgatataaatcagattcttctctctcattttatccctcacctgtagcatgccagtcccgtttcatttagtcatgtgaccactctgtcttgtgtttccacagcctgcaagttcagtccaggatgctaacatctaaaaatagacttaaatctcattgcttacaagcctaagaatctttagagaagtatacataagtttaggataaaataatgggattttcttttcttttctctggtaatattgacttgtatattttaagaaataacagaaagcctgggtgacatttgggagacatgtgacatttatatattgaattaatatccctacatgtattgcacattgtaaaaagttttagttttgatgagttgtgagtttaccttgtatactgtaggcacactttgcactgatatatcatgagtgaataaatgtcttgcctactcaaaaaaaaaaaa

SEQ ID NO: 98 - DNA, 3960 bp, Homo Sapiens
  ref <308>: DATABASE ACCESSION NUMBER: GenBank No. NM005424
  ref <309>: DATABASE ENTRY DATE: 2004-12-18
cacaggctgagcagtcaggcccacagcatctgaccccaggcccagctcgtcctggctggcctgggtcggcctctggagtatggtctggcgggtgccccctttcttgctccccatcctcttcttggcttctcatgtgggcgcggcggtggacctgacgctgctggccaacctgcggctcacggacccccagcgcttcttcctgacttgcgtgtctggggaggccggggcggggaggggctcggacgcctggggcccgcccctgctgctggagaaggacgaccgtatcgtgcgcaccccgcccgggccacccctgcgcctggcgcgcaacggttcgcaccaggtcacgcttcgcggcttctccaagccctcggacctcgtgggcgtcttctcctgcgtgggcggtgctggggcgcggcgcacgcgcgtcatctacgtgcacaacagccctggagcccacctgcttccagacaaggtcacacacactgtgaacaaaggtgacaccgctgtactttctgcacgtgtgcacaaggagaagcagacagacgtgatctggaagagcaacggatcctacttctacaccctggactggcatgaagcccaggatgggcggttcctgctgcagctcccaaatgtgcagccaccatcgagcggcatctacagtgccacttacctggaagccagccccctgggcagcgccttctttcggctcatcgtgcggggttgtggggctgggcgctgggggccaggctgtaccaaggagtgcccaggttgcctacatggaggtgtctgccacgaccatgacggcgaatgtgtatgcccccctggcttcactggcacccgctgtgaacaggcctgcagagagggccgttttgggcagagctgccaggagcagtgcccaggcatatcaggctgccggggcctcaccttctgcctcccagacccctatggctgctcttgtggatctggctggagaggaagccagtgccaagaagcttgtgcccctggtcattttggggctgattgccgactccagtgccagtgtcagaatggtggcacttgtgaccggttcagtggttgtgtctgcccctctgggtggcatggagtgcactgtgagaagtcagaccggatcccccagatcctcaacatggcctcagaactggagttcaacttagagacgatgccccggatcaactgtgcagctgcagggaaccccttccccgtgcggggcagcatagagctacgcaagccagacggcactgtgctcctgtccaccaaggccattgtggagccagagaagaccacagctgagttcgaggtgccccgcttggttcttgcggacagtgggttctgggagtgccgtgtgtccacatctggcggccaagacagccggcgcttcaaggtcaatgtgaaagtgccccccgtgcccctggctgcacctcggctcctgaccaagcagagccgccagcttgtggtctccccgctggtctcgttctctggggatggacccatctccactgtccgcctgcactaccggccccaggacagtaccatggactggtcgaccattgtggtggaccccagtgagaacgtgacgttaatgaacctgaggccaaagacaggatacagtgttcgtgtgcagctgagccggccaggggaaggaggagagggggcctgggggcctcccaccctcatgaccacagactgtcctgagcctttgttgcagccgtggttggagggctggcatgtggaaggcactgaccggctgcgagtgagctggtccttgcccttggtgcccgggccactggtgggcgacggtttcctgctgcgcctgtgggacgggacacgggggcaggagcggcgggagaacgtctcatccccccaggcccgcactgccctcctgacgggactcacgcctggcacccactaccagctggatgtgcagctctaccactgcaccctcctgggcccggcctcgccccctgcacacgtgcttctgccccccagtgggcctccagccccccgacacctccacgcccaggccctctcagactccgagatccagctgacatggaagcacccggaggctctgcctgggccaatatccaagtacgttgtggaggtgcaggtggctgggggtgcaggagacccactgtggatagacgtggacaggcctgaggagacaagcaccatcatccgtggcctcaacgccagcacgcgctacctcttccgcatgcgggccagcattcaggggctcggggactggagcaacacagtagaagagtccaccctgggcaacgggctgcaggctgagggcccagtccaagagagccgggcagctgaagagggcctggatcagcagctgatcctggcggtggtgggctccgtgtctgccacctgcctcaccatcctggccgcccttttaaccctggtgtgcatccgcagaagctgcctgcatcggagacgcaccttcacctaccagtcaggctcgggcgaggagaccatcctgcagttcagctcagggaccttgacacttacccggcggccaaaactgcagcccgagcccctgagctacccagtgctagagtgggaggacatcacctttgaggacctcatcggggaggggaacttcggccaggtcatccgggccatgatcaagaaggacgggctgaagatgaacgcagccatcaaaatgctgaaagagtatgcctctgaaaatgaccatcgtgactttgcgggagaactggaagttctgtgcaaattggggcatcaccccaacatcatcaacctcctgggggcctgtaagaaccgaggttacttgtatatcgctattgaatatgccccctacgggaacctgctagattttctgcggaaaagccgggtcctagagactgacccagcttttgctcgagagcatgggacagcctctacccttagctcccggcagctgctgcgtttcgccagtgatgcggccaatggcatgcagtacctgagtgagaagcagttcatccacagggacctggctgcccggaatgtgctggtcggagagaacctagcctccaagattgcagacttcggcctttctcggggagaggaggtttatgtgaagaagacgatggggcgtctccctgtgcgctggatggccattgagtccctgaactacagtgtctataccaccaagagtgatgtctggtcctttggagtccttctttgggagatagtgagccttggaggtacaccctactgtggcatgacctgtgccgagctctatgaaaagctgccccagggctaccgcatggagcagcctcgaaactgtgacgatgaagtgtacgagctgatgcgtcagtgctggcgggaccgtccctatgagcgacccccctttgcccagattgcgctacagctaggccgcatgctggaagccaggaaggcctatgtgaacatgtcgctgtttgagaacttcacttacgcgggcattgatgccacagctgaggaggcctgagctgccatccagccagaacgtggctctgctggccggagcaaactctgctgtctaacctgtgaccagtctgacccttacagcctctgacttaagctgcctcaaggaatttttttaacttaagggagaaaaaaagggatctggggatggggtgggcttaggggaactgggttcccatgctttgtaggtgtctcatagctatcctgggcatccttctttctagttcagctgccccacaggtgtgtttcccatcccactgctcccccaacacaaacccccactccagctccttcgcttaagccagcactcacaccactaacatgccctgttcagctactcccactcccggcctgtcattcagaaaaaaataaatgttctaataagctccaaaaaaaaaaaaaaaaaaaaaaaaaaaaaaaaaaaaaaaaaaaaaaaaaaaaaaaaaaaaaaaaaaaaaaaaaaaaaaa

SEQ ID NO: 99 - DNA, 3985 bp, Homo Sapiens
  ref <308>: DATABASE ACCESSION NUMBER: GenBank No. NM005211
  ref <309>: DATABASE ENTRY DATE: 2004-10-26
gaagggcagacagagtgtccaaaagcgtgagagcacgaagtgaggagaaggtggagaagagagaagaggaagaggaagaggaagagaggaagcggagggaactgcggccaggctaaaaggggaagaagaggatcagcccaaggaggaggaagaggaaaacaagacaaacagccagtgcagaggagaggaacgtgtgtccagtgtcccgatccctgcggagctagtagctgagagctctgtgccctgggcaccttgcagccctgcacctgcctgccacttccccaccgaggccatgggcccaggagttctgctgctcctgctggtggccacagcttggcatggtcagggaatcccagtgatagagcccagtgtccctgagctggtcgtgaagccaggagcaacggtgaccttgcgatgtgtgggcaatggcagcgtggaatgggatggccccccatcacctcactggaccctgtactctgatggctccagcagcatcctcagcaccaacaacgctaccttccaaaacacggggacctatcgctgcactgagcctggagaccccctgggaggcagcgccgccatccacctctatgtcaaagaccctgcccggccctggaacgtgctagcacaggaggtggtcgtgttcgaggaccaggacgcactactgccctgtctgctcacagacccggtgctggaagcaggcgtctcgctggtgcgtgtgcgtggccggcccctcatgcgccacaccaactactccttctcgccctggcatggcttcaccatccacagggccaagttcattcagagccaggactatcaatgcagtgccctgatgggtggcaggaaggtgatgtccatcagcatccggctgaaagtgcagaaagtcatcccagggcccccagccttgacactggtgcctgcagagctggtgcggattcgaggggaggctgcccagatcgtgtgctcagccagcagcgttgatgttaactttgatgtcttcctccaacacaacaacaccaagctcgcaatccctcaacaatctgactttcataataaccgttaccaaaaagtcctgaccctcaacctcgatcaagtagatttccaacatgccggcaactactcctgcgtggccagcaacgtgcagggcaagcactccacctccatgttcttccgggtggtagagagtgcctacttgaacttgagctctgagcagaacctcatccaggaggtgaccgtgggggaggggctcaacctcaaagtcatggtggaggcctacccaggcctgcaaggttttaactggacctacctgggacccttttctgaccaccagcctgagcccaagcttgctaatgctaccaccaaggacacatacaggcacaccttcaccctctctctgccccgcctgaagccctctgaggctggccgctactccttcctggccagaaacccaggaggctggagagctctgacgtttgagctcacccttcgataccccccagaggtaagcgtcatatggacattcatcaacggctctggcacccttttgtgtgctgcctctgggtacccccagcccaacgtgacatggctgcagtgcagtggccacactgataggtgtgatgaggcccaagtgctgcaggtctgggatgacccataccctgaggtcctgagccaggagcccttccacaaggtgacggtgcagagcctgctgactgttgagaccttagagcacaaccaaacctacgagtgcagggcccacaacagcgtggggagtggctcctgggccttcatacccatctctgcaggagcccacacgcatcccccggatgagttcctcttcacaccagtggtggtcgcctgcatgtccatcatggccttgctgctgctgctgctcctgctgctattgtacaagtataagcagaagcccaagtaccaggtccgctggaagatcatcgagagctatgagggcaacagttatactttcatcgaccccacgcagctgccttacaacgagaagtgggagttcccccggaacaacctgcagtttggtaagaccctcggagctggagcctttgggaaggtggtggaggccacggcctttggtctgggcaaggaggatgctgtcctgaaggtggctgtgaagatgctgaagtccacggcccatgctgatgagaaggaggccctcatgtccgagctgaagatcatgagccacctgggccagcacgagaacatcgtcaaccttctgggagcctgtacccatggaggccctgtactggtcatcacggagtactgttgctatggcgacctgctcaactttctgcgaaggaaggctgaggccatgctgggacccagcctgagccccggccaggaccccgagggaggcgtcgactataagaacatccacctcgagaagaaatatgtccgcagggacagtggcttctccagccagggtgtggacacctatgtggagatgaggcctgtctccacttcttcaaatgactccttctctgagcaagacctggacaaggaggatggacggcccctggagctccgggacctgcttcacttctccagccaagtagcccagggcatggccttcctcgcttccaagaattgcatccaccgggacgtggcagcgcgtaacgtgctgttgaccaatggtcatgtggccaagattggggacttcgggctggctagggacatcatgaatgactccaactacattgtcaagggcaatgcccgcctgcctgtgaagtggatggccccagagagcatctttgactgtgtctacacggttcagagcgacgtctggtcctatggcatcctcctctgggagatcttctcacttgggctgaatccctaccctggcatcctggtgaacagcaagttctataaactggtgaaggatggataccaaatggcccagcctgcatttgccccaaagaatatatacagcatcatgcaggcctgctgggccttggagcccacccacagacccaccttccagcagatctgctccttccttcaggagcaggcccaagaggacaggagagagcgggactataccaatctgccgagcagcagcagaagcggtggcagcggcagcagcagcagtgagctggaggaggagagctctagtgagcacctgacctgctgcgagcaaggggatatcgcccagcccttgctgcagcccaacaactatcagttctgctgaggagttgacgacagggagtaccactctcccctcctccaaacttcaactcctccatggatggggcgacacggggagaacatacaaactctgccttcggtcatttcactcaacagctcggcccagctctgaaacttgggaaggtgagggattcaggggaggtcagaggatcccacttcctgagcatgggccatcactgccagtcaggggctgggggctgagccctcacccccccctcccctactgttctcatggtgttggcctcgtgtttgctatgccaactagtagaaccttctttcctaatccccttatcttcatggaaatggactgactttatgcctatgaagtccccaggagctacactgatactgagaaaaccaggctctttggggctagacagactggcagagagtgagatctccctctctgagaggagcagcagatgctcacagaccacactcagctcaggccccttggagcaggatggctcctctaagaatctcacaggacctcttagtctctgccctatacgccgccttcactccacagcctcacccctcccacccccatactggtactgctgtaatgagccaagtggcagctaaaagttgggggtgttctgcccagtcccgtcattctgggctagaaggcaggggaccttggcatgtggctggccacaccaagcaggaagcacaaactcccccaagctgactcatcctaactaacagtcacgccgtgggatgtctctgtccacattaaactaacagcattaatgca

SEQ ID NO: 100 - DNA, 5598 bp, Homo Sapiens
  ref <308>: DATABASE ACCESSION NUMBER: GenBank No. NM002609
  ref <309>: DATABASE ENTRY DATE: 2004-10-26
ggcccctcagccctgctgcccagcacgagcctgtgctcgccctgcccaacgcagacagccagacccagggcggcccctctggcggctctgctcctcccgaaggatgcttggggagtgaggcgaagctgggcgctcctctcccctacagcagcccccttcctccatccctctgttctcctgagccttcaggagcctgcaccagtcctgcctgtccttctactcagctgttacccactctgggaccagcagtctttctgataactgggagagggcagtaaggaggacttcctggagggggtgactgtccagagcctggaactgtgcccacaccagaagccatcagcagcaaggacaccatgcggcttccgggtgcgatgccagctctggccctcaaaggcgagctgctgttgctgtctctcctgttacttctggaaccacagatctctcagggcctggtcgtcacacccccggggccagagcttgtcctcaatgtctccagcaccttcgttctgacctgctcgggttcagctccggtggtgtgggaacggatgtcccaggagcccccacaggaaatggccaaggcccaggatggcaccttctccagcgtgctcacactgaccaacctcactgggctagacacgggagaatacttttgcacccacaatgactcccgtggactggagaccgatgagcggaaacggctctacatctttgtgccagatcccaccgtgggcttcctccctaatgatgccgaggaactattcatctttctcacggaaataactgagatcaccattccatgccgagtaacagacccacagctggtggtgacactgcacgagaagaaaggggacgttgcactgcctgtcccctatgatcaccaacgtggcttttctggtatctttgaggacagaagctacatctgcaaaaccaccattggggacagggaggtggattctgatgcctactatgtctacagactccaggtgtcatccatcaacgtctctgtgaacgcagtgcagactgtggtccgccagggtgagaacatcaccctcatgtgcattgtgatcgggaatgaggtggtcaacttcgagtggacatacccccgcaaagaaagtgggcggctggtggagccggtgactgacttcctcttggatatgccttaccacatccgctccatcctgcacatccccagtgccgagttagaagactcggggacctacacctgcaatgtgacggagagtgtgaatgaccatcaggatgaaaaggccatcaacatcaccgtggttgagagcggctacgtgcggctcctgggagaggtgggcacactacaatttgctgagctgcatcggagccggacactgcaggtagtgttcgaggcctacccaccgcccactgtcctgtggttcaaagacaaccgcaccctgggcgactccagcgctggcgaaatcgccctgtccacgcgcaacgtgtcggagacccggtatgtgtcagagctgacactggttcgcgtgaaggtggcagaggctggccactacaccatgcgggccttccatgaggatgctgaggtccagctctccttccagctacagatcaatgtccctgtccgagtgctggagctaagtgagagccaccctgacagtggggaacagacagtccgctgtcgtggccggggcatgccccagccgaacatcatctggtctgcctgcagagacctcaaaaggtgtccacgtgagctgccgcccacgctgctggggaacagttccgaagaggagagccagctggagactaacgtgacgtactgggaggaggagcaggagtttgaggtggtgagcacactgcgtctgcagcacgtggatcggccactgtcggtgcgctgcacgctgcgcaacgctgtgggccaggacacgcaggaggtcatcgtggtgccacactccttgccctttaaggtggtggtgatctcagccatcctggccctggtggtgctcaccatcatctcccttatcatcctcatcatgctttggcagaagaagccacgttacgagatccgatggaaggtgattgagtctgtgagctctgacggccatgagtacatctacgtggaccccatgcagctgccctatgactccacgtgggagctgccgcgggaccagcttgtgctgggacgcaccctcggctctggggcctttgggcaggtggtggaggccacggctcatggcctgagccattctcaggccacgatgaaagtggccgtcaagatgcttaaatccacagcccgcagcagtgagaagcaagcccttatgtcggagctgaagatcatgagtcaccttgggccccacctgaacgtggtcaacctgttgggggcctgcaccaaaggaggacccatctatatcatcactgagtactgccgctacggagacctggtggactacctgcaccgcaacaaacacaccttcctgcagcaccactccgacaagcgccgcccgcccagcgcggagctctacagcaatgctctgcccgttgggctccccctgcccagccatgtgtccttgaccggggagagcgacggtggctacatggacatgagcaaggacgagtcggtggactatgtgcccatgctggacatgaaaggagacgtcaaatatgcagacatcgagtcctccaactacatggccccttacgataactacgttccctctgcccctgagaggacctgccgagcaactttgatcaacgagtctccagtgctaagctacatggacctcgtgggcttcagctaccaggtggccaatggcatggagtttctggcctccaagaactgcgtccacagagacctggcggctaggaacgtgctcatctgtgaaggcaagctggtcaagatctgtgactttggcctggctcgagacatcatgcgggactcgaattacatctccaaaggcagcacctttttgcctttaaagtggatggctccggagagcatcttcaacagcctctacaccaccctgagcgacgtgtggtccttcgggatcctgctctgggagatcttcaccttgggtggcaccccttacccagagctgcccatgaacgagcagttctacaatgccatcaaacggggttaccgcatggcccagcctgcccatgcctccgacgagatctatgagatcatgcagaagtgctgggaagagaagtttgagattcggccccccttctcccagctggtgctgcttctcgagagactgttgggcgaaggttacaaaaagaagtaccagcaggtggatgaggagtttctgaggagtgaccacccagccatccttcggtcccaggcccgcttgcctgggttccatggcctccgatctcccctggacaccagctccgtcctctatactgccgtgcagcccaatgagggtgacaacgactatatcatccccctgcctgaccccaaacccgaggttgctgacgagggcccactggagggttcccccagcctagccagctccaccctgaatgaagtcaacacctcctcaaccatctcctgtgacagccccctggagccccaggacgaaccagagccagagccccagcttgagctccaggtggagccggagccagagctggaacagttgccggattcggggtgccctgcgcctcgggcggaagcagaggatagcttcctgtagggggctggcccctaccctgccctgcctgaagctccccccctgccagcacccagcatctcctggcctggcctgaccgggcttcctgtcagccaggctgcccttatcagctgtccccttctggaagctttctgctcctgacgtgttgtgccccaaaccctggggctggcttaggaggcaagaaaactgcaggggccgtgaccagccctctgcctccagggaggccaactgactctgagccagggttcccccagggaactcagttttcccatatgtaagatgggaaagttaggcttgatgacccagaatctaggattctctccctggctgacaggtggggagaccgaatccctccctgggaagattcttggagttactgaggtggtaaattaacttttttctgttcagccagctacccctcaaggaatcatagctctctcctcgcactttttatccacccaggagctagggaagagaccctagcctccctggctgctggctgagctagggcctagccttgagcagtgttgcctcatccagaagaaagccagtctcctccctatgatgccagtccctgcgttccctggcccgagctggtctggggccattaggcagcctaattaatgctggaggctgagccaagtacaggacacccccagcctgcagcccttgcccagggcacttggagcacacgcagccatagcaagtgcctgtgtccctgtccttcaggcccatcagtcctggggctttttctttatcaccctcagtcttaatccatccaccagagtctagaaggccagacgggccccgcatctgtgatgagaatgtaaatgtgccagtgtggagtggccacgtgtgtgtgccagtatatggccctggctctgcattggacctgctatgaggctttggaggaatccctcaccctctctgggcctcagtttccccttcaaaaaatgaataagtcggacttattaactctgagtgccttgccagcactaacattctagagtattccaggtggttgcacatttgtccagatgaagcaaggccatataccctaaacttccatcctgggggtcagctgggctcctgggagattccagatcacacatcacactctggggactcaggaaccatgccccttccccaggcccccagcaagtctcaagaacacagctgcacaggccttgacttagagtgacagccggtgtcctggaaagccccaagcagctgccccagggacatgggaagaccacgggacctctttcactacccacgatgacctccgggggtatcctgggcaaaagggacaaagagggcaaatgagatcacctcctgcagcccaccactccagcacctgtgccgaggtctgcgtcgaagacagaatggacagtgaggacagttatgtcttgtaaaagacaagaagcttcagatggtaccccaagaaggatgtgagaggtggccgcttggagtttgcccctcacccaccagctgccccatccctgaggcagcgctccatgggggtatggttttgtcactgcccagacctagcagtgacatctcattgtccccagcccagtgggcattggaggtgccaggggagtcagggttgtagccaagacgcccccgcacggggagggttgggaagggggtgcaggaagctcaacccctctgggcaccaaccctgcattgcaggttggcaccttacttccctgggatccccagagttggtccaaggagggagagtgggttctcaatacggtaccaaagatataatcacctaggtttacaaatatttttaggactcacgttaactcacatttatacagcagaaatgctattttgtatgctgttaagtttttctatctgtgtacttttttttaagggaaagattttaatattaaacctggtgcttctcactcac

SEQ ID NO: 101 - DNA, 3343 bp, Homo Sapiens
  ref <308>: DATABASE ACCESSION NUMBER: GenBank No. M34641
  ref <309>: DATABASE ENTRY DATE: 2001-12-14
gaattcgggatgtggagctggaagtgcctcctcttctgggctgtgctggtcacagccacactctgcaccgctaggccgtccccgaccttgcctgaacaagcccagccctggggagcccctgtggaagtggagtccttcctggtccaccccggtgacctgctgcagcttcgctgtcggctgcgggacgatgtgcagagcatcaactggctgcgggacggggtgcagctggcggaaagcaaccgcacccgcatcacaggggaggaggtggaggtgcaggactccgtgcccgcagactccggcctctatgcttgcgtaaccagcagcccctcgggcagtgacaccacctacttctccgtcaatgtttcagatgctctcccctcctcggaggatgatgatgatgatgatgactcctcttcagaggagaaagaaacagataacaccaaaccaaaccccgtagctccatattggacatccccagaaaagatggaaaagaaattgcatgcagtgccggctgccaagacagtgaagttcaaatgcccttccagtgggaccccaaaccccacactgcgctggttgaaaaatagcaaagaattcaaacctgaccacagaattggaggctacaaggtccgttatgccacctggagcatcataatggactctgtggtgccctctgacaagggcaactacacctgcattgtggagaatgagtacggcagcatcaaccacacataccagctggatgtcgtggagcggtcccctcaccggcccatcctgcaagcagggttgcccgccaacaaaacagtggccctgggtagcaacgtggagttcatgtgtaaggtgtacagtgacccgcagccgcacatccagtggctaaagcacatcgaggtgaatgggagcaagattggcccagacaacctgccttatgtccagatcttgaagactgctggagttaataccaccgacaaagagatggaggtgcttcacttaagaaatgtctcctttgaggacgcaggggagtatacgtgcttggcgggtaactctatcggactctcccatcactctgcatggttgaccgttctggaagccctggaagagaggccggcagtgatgacctcgcccctgtacctggagatcatcatctattgcacaggggccttcctcatctcctgcatggtggggtcggtcatcgtctacaagatgaagagtggtaccaagaagagtgacttccacagccagatggctgtgcacaagctggccaagagcatccctctgcgcagacaggtaacagtgtctgctgactccagtgcatccatgaactctggggttcttctggttcggccatcacggctctcctccagtgggactcccatgctagcaggggtctctgagtatgagcttcccgaagaccctcgctgggagctgcctcgggacagactggtcttaggcaaacccctgggagagggctgctttgggcaggtggtgttggcagaggctatcgggctggacaaggacaaacccaaccgtgtgaccaaagtggctgtgaagatgttgaagtcggacgcaacagagaaagacttgtcagacctgatctcagaaatggagatgatgaagatgatcgggaagcataagaatatcatcaacctgctgggggcctgcacgcaggatggtcccttgtatgtcatcgtggagtatgcctccaagggcaacctgcgggagtacctgcaggcccggaggcccccagggctggaatactgctacaaccccagccacaacccagaggagcagctctcctccaaggacctggtgtcctgcgcctaccaggtggcccgaggcatggagtatctggcctccaagaagtgcatacaccgagacctggcagccaggaatgtcctggtgacagaggacaatgtgatgaagatagcagactttggcctcgcacgggacattcaccacatcgactactataaaaagacaaccaacggccgactgcctgtgaagtggatggcacccgaggcattatttgaccggatctacacccaccagagtgatgtgtggtctttcggggtgctcctgtgggagatcttcactctgggcggctccccataccccggtgtgcctgtggaggaacttttcaagctgctgaaggagggtcaccgcatggacaagcccagtaactgcaccaacgagctgtacatgatgatgcgggactgctggcatgcagtgccctcacagagacccaccttcaagcagctggtggaagacctggaccgcatcgtggccttgacctccaaccaggagtacctggacctgtccatgcccctggaccagtactcccccagctttcccgacacccggagctctacgtgctcctcaggggaggattccgtcttctctcatgagccgctgcccgaggagccctgcctgccccgacacccagcccagcttgccaatggcggactcaaacgccgctgactgccacccacacgccctccccagactccaccgtcagctgtaaccctcacccacagcccctgctgggcccaccacctgtccgtccctgtcccctttcctgctggcaggagccggctgcctaccaggggccttcctgtgtggcctgccttcaccccactcagctcacctctccctccacctcctctccacctgctggtgagaggtgcaaagaggcagatctttgctgccagccacttcatcccctcccagatgttggaccaacacccctccctgccacagcatcgcctggagggcagggagtgggagccaatgaacaggcatgcaagtgagagcttcctgagctttctctgtcggtttggtctgttttgccttcacccataagcccctcgcactctggtggcaggtgccttgtcctcagggctacagcagtagggaggtcagtgcttcgtgcctcgattgaaggtgacctctgccccagataggtggtgcagtggcttattaattccgatactagtttgctttgctgaccaaatgcctggtaccagaggatggtgaggcgaaggccaggttgggggcagtgttgtggccctggggccagccccaaactgggggctctgtatatagctatgaagaaaacacaaagtgtataaatctgagtatatatttacatgtctttttaaaagggtcgttaccagagatttacccatcgggtaagatgctcctggtggctgggaggcatcagttgctatatattaaaaacaaaaaagaaaaaaaaggaaaatgtttttaaaaaggtcatatattttttgctacttttgctgttttatttttttaaattatgttctaaactcgtgccgctcgtgccgaattc

SEQ ID NO: 102 - DNA, 3363 bp, Homo Sapiens
  ref <308>: DATABASE ACCESSION NUMBER: GenBank No. NM005232
  ref <309>: DATABASE ENTRY DATE: 2004-11-29
gcccccgcccggcccgccccgctctcctagtcccttgcaacctggcgctgccatccgggccactgtcccaggtcccggcccggagctatggagcggcgctggcccctggggctagggctggtgctgctgctctgcgccccgctgcccccgggggcgcgcgccaaggaagttactctgatggacacaagcaaggcacagggagagctgggctggctgctggatcccccaaaagatgggtggagtgaacagcaacagatactgaatgggacacccctgtacatgtaccaggactgcccaatgcaaggacgcagagacactgaccactggcttcgctccaattggatctaccgcggggaggaggcttcccgcgtccacgtggagctgcagttcaccgtgcgggactgcaagagtttccctgggggagccgggcctctgggctgcaaggagaccttcaaccttctgtacatggagagtgaccaggatgtgggcattcagctccgacggcccttgttccagaaggtaaccacggtggctgcagaccagagcttcaccattcgagaccttgcgtctggctccgtgaagctgaatgtggagcgctgctctctgggccgcctgacccgccgtggcctctacctcgctttccacaacccgggtgcctgtgtggccctggtgtctgtccgggtcttctaccagcgctgtcctgagaccctgaatggcttggcccaattcccagacactctgcctggccccgctgggttggtggaagtggcggggacctgcttgccccacgcgcgggccagccccaggccctcaggtgcaccccgcatgcactgcagccctgatggcgagtggctggtgcctgtaggacggtgccactgtgagcctggctatgaggaaggtggcagtggcgaagcatgtgttgcctgccctagcggctcctaccggatggacatggacacaccccattgtctcacgtgcccccagcagagcactgctgagtctgagggggccaccatctgtacctgtgagagcggccattacagagctcccggggagggcccccaggtggcatgcacaggtcccccctcggccccccgaaacctgagcttctctgcctcagggactcagctctccctgcgttgggaacccccagcagatacggggggacgccaggatgtcagatacagtgtgaggtgttcccagtgtcagggcacagcacaggacggggggccctgccagccctgtggggtgggcgtgcacttctcgccgggggcccgggcgctcaccacacctgcagtgcatgtcaatggccttgaaccttatgccaactacacctttaatgtggaagcccaaaatggagtgtcagggctgggcagctctggccatgccagcacctcagtcagcatcagcatggggcatgcagagtcactgtcaggcctgtctctgagactggtgaagaaagaaccgaggcaactagagctgacctgggcggggtcccggccccgaagccctggggcgaacctgacctatgagctgcacgtgctgaaccaggatgaagaacggtaccagatggttctagaacccagggtcttgctgacagagctgcagcctgacaccacatacatcgtcagagtccgaatgctgaccccactgggtcctggccctttctcccctgatcatgagtttcggaccagcccaccagtgtccaggggcctgactggaggagagattgtagccgtcatctttgggctgctgcttggtgcagccttgctgcttgggattctcgttttccggtccaggagagcccagcggcagaggcagcagaggcagcgtgaccgcgccaccgatgtggatcgagaggacaagctgtggctgaagccttatgtggacctccaggcatacgaggaccctgcacagggagccttggactttacccgggagcttgatccagcgtggctgatggtggacactgtcataggagaaggagagtttggggaagtgtatcgagggaccctgaggctccccagccaggactgcaagactgtggccattaagaccttaaaagacacatccccaggtggccagtggtggaacttccttcgagaggcaactatcatgggccagtttagccacccgcatattctgcatctggaaggcgtcgtcacaaagcgaaagccgatcatgatcatcacagaatttatggagaatggagccctggatgccttcctgagggagcgggaggaccagctggtccctgggcagctagtggccatgctgcagggcatagcatctggcatgaactacctcagtaatcacaattatgtccaccgggacctggctgccagaaacatcttggtgaatcaaaacctgtgctgcaaggtgtctgactttggcctgactcgcctcctggatgactttgatggcacatacgaaacccagggaggaaagatccctatccgttggacagcccctgaagccattgcccatcggatcttcaccacagccagcgatgtgtggagctttgggattgtgatgtgggaggtgctgagctttggggacaagccttatggggagatgagcaatcaggaggttatgaagagcattgaggatgggtaccggttgccccctcctgtggactgccctgcccctctgtatgagctcatgaagaactgctgggcatatgaccgtgcccgccggccacacttccagaagcttcaggcacatctggagcaactgcttgccaacccccactccctgcggaccattgccaactttgaccccagggtgactcttcgcctgcccagcctgagtggctcagatgggatcccgtatcgaaccgtctctgagtggctcgagtccatacgcatgaaacgctacatcctgcacttccactcggctgggctggacaccatggagtgtgtgctggagctgaccgctgaggacctgacgcagatgggaatcacactgcccgggcaccagaagcgcattctttgcagtattcagggattcaaggactgatccctcctctcaccccatgcccaatcagggtgcaaggagcaaggacggggccaaggtcgctcatggtcactccctgcgccccttcccacaacctgccagactaggctatcggtgctgcttctgcccactttcaggagaaccctgctctgcaccccagaaaacctctttgttttaaaagggaggtgggggtagaagtaaaaggatgatcatgggagggagctgaggggttaatatatatacatacatacacatatatatatttttgtaaataaacaggaactgattttctgcctccatcccacccatgagggctgcaggcactacaaaagagctgactactgagaa

SEQ ID NO: 103 - DNA, 3865 bp, Homo Sapiens
  ref <308>: DATABASE ACCESSION NUMBER: GenBank No. NM004441
  ref <309>: DATABASE ENTRY DATE: 2004-11-15
cacatgcacacccacacccacgcgcgcccgcaccgccccacgcgcacacactcctgcccacgcccacgcagcgctccgggaagtccggtccgggcgagagcgcgaaaggataccgagaagccacccgcggagagcgcagcggcgccctgggacgcggcgctctcccggcgctgctgcctcggcttggtctcggcctgcgggccgtcggccggcgatggccctggattatctactactgctcctcctggcatccgcagtggctgcgatggaagaaacgttaatggacaccagaacggctactgcagagctgggctggacggccaatcctgcgtccgggtgggaagaagtcagtggctacgatgaaaacctgaacaccatccgcacctaccaggtgtgcaatgtcttcgagcccaaccagaacaattggctgctcaccaccttcatcaaccggcggggggcccatcgcatctacacagagatgcgcttcactgtgagagactgcagcagcctccctaatgtcccaggatcctgcaaggagaccttcaacttgtattactatgagactgactctgtcattgccaccaagaagtcagccttctggtctgaggccccctacctcaaagtagacaccattgctgcagatgagagcttctcccaggtggactttgggggaaggctgatgaaggtaaacacagaagtcaggagctttgggcctcttactcggaatggtttttacctcgcttttcaggattatggagcctgtatgtctcttctttctgtccgtgtcttcttcaaaaagtgtcccagcattgtgcaaaattttgcagtgtttccagagactatgacaggggcagagagcacatctctggtgattgctcggggcacatgcatccccaacgcagaggaagtggacgtgcccatcaaactctactgcaacggggatggggaatggatggtgcctattgggcgatgcacctgcaagcctggctatgagcctgagaacagcgtggcatgcaaggcttgccctgcagggacattcaaggccagccaggaagctgaaggctgctcccactgcccctccaacagccgctcccctgcagaggcgtctcccatctgcacctgtcggaccggttattaccgagcggactttgaccctccagaagtggcatgcactagcgtcccatcaggtccccgcaatgttatctccatcgtcaatgagacgtccatcattctggagtggcaccctccaagggagacaggtgggcgggatgatgtgacctacaacatcatctgcaaaaagtgccgggcagaccgccggagctgctcccgctgtgacgacaatgtggagtttgtgcccaggcagctgggcctgacggagtgccgcgtctccatcagcagcctgtgggcccacaccccctacacctttgacatccaggccatcaatggagtctccagcaagagtcccttccccccacagcacgtctctgtcaacatcaccacaaaccaagccgccccctccaccgttcccatcatgcaccaagtcagtgccactatgaggagcatcaccttgtcatggccacagccggagcagcccaatggcatcatcctggactatgagatccggtactatgagaaggaacacaatgagttcaactcctccatggccaggagtcagaccaacacagcaaggattgatgggctgcggcctggcatggtatatgtggtacaggtgcgtgcccgcactgttgctggctacggcaagttcagtggcaagatgtgcttccagactctgactgacgatgattacaagtcagagctgagggagcagctgcccctgattgctggctcggcagcggccggggtcgtgttcgttgtgtccttggtggccatctctatcgtctgtagcaggaaacgggcttatagcaaagaggctgtgtacagcgataagctccagcattacagcacaggccgaggctccccagggatgaagatctacattgaccccttcacttatgaggatcccaacgaagctgtccgggagtttgccaaggagattgatgtatcttttgtgaaaattgaagaggtcatcggagcaggggagtttggagaagtgtacaaggggcgtttgaaactgccaggcaagagggaaatctacgtggccatcaagaccctgaaggcagggtactcggagaagcagcgtcgggactttctgagtgaggcgagcatcatgggccagttcgaccatcctaacatcattcgcctggagggtgtggtcaccaagagtcggcctgtcatgatcatcacagagttcatggagaatggtgcattggattctttcctcaggcaaaatgacgggcagttcaccgtgatccagcttgtgggtatgctcaggggcatcgctgctggcatgaagtacctggctgagatgaattatgtgcatcgggacctggctgctaggaacattctggtcaacagtaacctggtgtgcaaggtgtccgactttggcctctcccgctacctccaggatgacacctcagatcccacctacaccagctccttgggagggaagatccctgtgagatggacagctccagaggccatcgcctaccgcaagttcacttcagccagcgacgtttggagctatgggatcgtcatgtgggaagtcatgtcatttggagagagaccctattgggatatgtccaaccaagatgtcatcaatgccatcgagcaggactaccggctgcccccacccatggactgtccagctgctctacaccagctcatgctggactgttggcagaaggaccggaacagccggccccggtttgcggagattgtcaacaccctagataagatgatccggaacccggcaagtctcaagactgtggcaaccatcaccgccgtgccttcccagcccctgctcgaccgctccatcccagacttcacggcctttaccaccgtggatgactggctcagcgccatcaaaatggtccagtacagggacagcttcctcactgctggcttcacctccctccagctggtcacccagatgacatcagaagacctcctgagaataggcatcaccttggcaggccatcagaagaagatcctgaacagcattcattctatgagggtccagataagtcagtcaccaacggcaatggcatgagaactcttgtttcttggggaaggagaggagggaaaaggaccagggtcaagggggaccagaggttgaccactgtggaatgtactggagagactggcttctcagctgaggaatgcatttccatcagtgaagaatcaaccggacctgttgctagcaggcaatctccatttctcagtgacagaagcatgtttgagatgccgtgggaaaccaaatatataataataaaaatataaaaaggtgatgttcaacagaagtgaagacaaaacaatatgcatcaggagaacaagagtaaacccagctcccactctcagtgggctgcagttgcccaaccacaggaagaaagggaaggaggtagagggaagaaacagaagcagtgttccattttcttcctcaccaatgacattcttttcttttctcctttcgtactcctccctgagagtcccctcccttctcccacactcgtttccctttgctcatgactcctgtagggaagtttcttcaaacaaaacccagctcctgagtctccagatgttgttctgtcagttgccaaaggactttgctgaccactgcatggggatccaaccaattcaattaatgtcttcatattgaagaagagatgtaccttcaattgaaaacctcgtttttcttttgtttgcattttctgcaaaaaggaaaaagaaaccacaaattggggaattc

SEQ ID NO: 104 - DNA, 1721 bp, Homo Sapiens
ctctctggctactagagacccactgcttactggcttatcgaaattaatacgactcactatagggagacccaagctggctagttaagcttggtaccgagctcggatccaccatggagctccaggcagcccgcgcctgcttcgccctgctgtggggctgtgcgctggccgcggccgcggcggcgcagggcaaggaagtggtactgctggactttgctgcagctggaggggagctcggctggctcacacacccgtatggcaaagggtgggacctgatgcagaacatcatgaatgacatgccgatctacatgtactccgtgtgcaacgtgatgtctggcgaccaggacaactggctccgcaccaactgggtgtaccgaggagaggctgagcgtatcttcattgagctcaagtttactgtacgtgactgcaacagcttccctggtggcgccagctcctgcaaggagactttcaacctctactatgccgagtcggacctggactacggcaccaacttccagaagcgcctgttcaccaagattgacaccattgcgcccgatgagatcaccgtcagcagcgacttcgaggcacgccacgtgaagctgaacgtggaggagcgctccgtggggccgctcacccgcaaaggcttctacctggccttccaggatatcggtgcctgtgtggcactactctccgtccgtgtctactacgagaagtgccccgagccgctgcagggcctggcccacttccctgagaccatcgccggctctgatgcaccttccctggccactgtggccggcacctgtgtggaccatgccgtggtgccaccggggggtgaagagccccgtatgcactgtgcagtggatggcgagtggctggtgcccattgggcagtgcctgtgccaggcaggctacgagaaggtggaggatgcctgccaggcctgctcgcctggattttttaagtttgaggcatccgagagcccctgcttggagtgccctgagcgcacgctgccatcccctgagggtgccacctcctgcgagtgtgaggaaggcttcttccgggcacctcaggacccagcgtcgatgccttgcacacgacccccttccgccccacactacctcacagccgtgggcatgggtgccaaggtggagctgcgctggacgccccctcaggacagcgggggccgcgaggacattgtctacagcgtcacctgcgaacagtgctggcccgagtctggggaatgcgggccgtgtgaggccagtgtgcgctactcggagcctcctcacggactgacccgcaccagtgtgacagtgagcgacctggagccccacatgaactacaccttcaccgtggaggcccgcaatggcgtctcaggcctggtaaccagccgcagcttccgtactgccagtgtcagcatcaaccagacagagccccccaaggtgaggctggagggccgcagcaccacctcgcttagcgtctcctggagcatccccccgccgcagcagagccgagtgtggaagtacgaggtcacttaccgcaagaaggtaactcccagaggggcggggctggctctagctgggccgacagcaggggacaggctggtcacactcgagtctagagggcccttcgaacaaaaactcatctcagaagaggatctgaatatgcataccggtcatcatcaccatcaccattgagtttaaacccgctgatcagcctcgactgtgcct

SEQ ID NO: 105 - protein, 497 aa, Homo Sapiens
MELQAARACFALLWGCALAAAAAAQGKEVVLLDFAAAGGELGWLTHPYGKGWDLMQNIMNDMPIYMYSVCNVMSGDQDNWLRTNWVYRGEAERIFIELKFTVRDCNSFPGGASSCKETFNLYYAESDLDYGTNFQKRLFTKIDTIAPDEITVSSDFEARHVKLNVEERSVGPLTRKGFYLAFQDIGACVALLSVRVYYEKCPEPLQGLAHFPETIAGSDAPSLATVAGTCVDHAVVPPGGEEPRMHCAVDGEWLVPIGQCLCQAGYEKVEDACQACSPGFFKFEASESPCLECPERTLPSPEGATSCECEEGFFRAPQDPASMPCTRPPSAPHYLTAVGMGAKVELRWTPPQDSGGREDIVYSVTCEQCWPESGECGPCEASVRYSEPPHGLTRTSVTVSDLEPHMNYTFTVEARNGVSGLVTSRSFRTASVSINQTEPPKVRLEGRSTTSLSVSWSIPPPQQSRVWKYEVTYRKKVTPRGAGLALAGPTAGDRLVT

SEQ ID NO: 106 - DNA, 1353 bp, Homo Sapiens
agtcccgcgcggagtatcggcgtccacccgcccagggagagtcagacctgggggggcgagggccccccaaactcagttcggatcctacccgagtgaggcggcgccatggagctccgggtgctgctctgctgggcttcgttggccgcagctttggaagagaccctgctgaacacaaaattggaaactgctgatctgaagtgggtgacattccctcaggtggacgggcagtgggaggaactgagcggcctggatgaggaacagcacagcgtgcgcacctacgaagtgtgtgacgtgcagcgtgccccgggccaggcccactggcttcgcacaggttgggtcccacggcggggcgccgtccacgtgtacgccacgctgcgcttcaccatgctcgagtgcctgtccctgcctcgggctgggcgctcctgcaaggagaccttcaccgtcttctactatgagagcgatgcggacacggccacggccctcacgccagcctggatggagaacccctacatcaaggtggacacggtggccgcggagcatctcacccggaagcgccctggggccgaggccaccgggaaggtgaatgtcaagacgctgcgtctgggaccgctcagcaaggctggcttctacctggccttccaggaccagggtgcctgcatggccctgctatccctgcacctcttctacaaaaagtgcgcccagctgactgtgaacctgactcgattcccggagactgtgcctcgggagctggttgtgcccgtggccggtagctgcgtggtggatgccgtccccgcccctggccccagccccagcctctactgccgtgaggatggccagtgggccgaacagccggtcacgggctgcagctgtgctccggggttcgaggcagctgaggggaacaccaagtgccgagggcgccgagggtcccagcagcgtgcggttcctgaagacgtcagaaaaccgggcagagctgcgggggctgaagcggggagccagctacctggtgcaggtacgggcgcgctctgaggccggctacgggcccttcggccaggaacatcacagccagacccaactggatgagagcgagggctggcgggagcagctggccctgattgcgggcacggcagtcgtgggtgtggtcctggtcctggtggtcattgtggtcgcagttctctgcctcaggaagcagagcaatgggagagaagcagaatattcggacaaacacggacagtatctcatcggacatggtactaaggtctacatcgaccccttcacttatgaagaccctaatgaggctgtgagggaatttgcaaaagagatcgatgtctcctacgtcaagattgaagaggtgat

SEQ ID NO: 107 - protein, 306 aa, Homo Sapiens
MELRVLLCWASLAAALEETLLNTKLETADLKWVTFPQVDGQWEELSGLDEEQHSVRTYEVCDVQRAPGQAHWLRTGWVPRRGAVHVYATLRFTMLECLSLPRAGRSCKETFTVFYYESDADTATALTPAWMENPYIKVDTVAAEHLTRKRPGAEATGKVNVKTLRLGPLSKAGFYLAFQDQGACMALLSLHLFYKKCAQLTVNLTRFPETVPRELVVPVAGSCVVDAVPAPGPSPSLYCREDGQWAEQPVTGCSCAPGFEAAEGNTKCRGRRGSQQRAVPEDVRKPGRAAGAEAGSQLPGAGTGAL

SEQ ID NO: 108 - DNA, 1813 bp, Homo Sapiens
actcagttcggatcctacccgagtgaggcggcgccatggagctccgggtgctgctctgctgggcttcgttggccgcagctttggaagagaccctgctgaacacaaaattggaaactgctgatctgaagtgggtgacattccctcaggtggacgggcagtgggaggaactgagcggcctggatgaggaacagcacagcgtgcgcacctacgaagtgtgtgacgtgcagcgtgccccgggccaggcccactggcttcgcacaggttgggtcccacggcggggcgccgtccacgtgtacgccacgctgcgcttcaccatgctcgagtgcctgtccctgcctcgggctgggcgctcctgcaaggagaccttcaccgtcttctactatgagagcgatgcggacacggccacggccctcacgccagcctggatggagaacccctacatcaaggtggacacggtggccgcggagcatctcacccggaagcgccctggggccgaggccaccgggaaggtgaatgtcaagacgctgcgtctgggaccgctcagcaaggctggcttctacctggccttccaggaccagggtgcctgcatggccctgctatccctgcacctcttctacaaaaagtgcgcccagctgactgtgaacctgactcgattcccggagactgtgcctcgggagctggttgtgcccgtggccggtagctgcgtggtggatgccgtccccgcccctggccccagccccagcctctactgccgtgaggatggccagtgggccgaacagccggtcacgggctgcagctgtgctccggggttcgaggcagctgaggggaacaccaagtgccgagcctgtgcccagggcaccttcaagcccctgtcaggagaagggtcctgccagccatgcccagccaatagccactctaacaccattggatcagccgtctgccagtgccgcgtcgggtacttccgggcacgcacagacccccggggtgcaccctgcaccacccctccttcggctccgcggagcgtggtttcccgcctgaacggctcctccctgcacctggaatggagtgcccccctggagtctggtggccgagaggacctcacctacgccctccgctgccgggagtgccgacccggaggctcctgtgcgccctgcgggggagacctgacttttgaccccggcccccgggacctggtggagccctgggtggtggttcgagggctacgtcctgacttcacctatacctttgaggtcactgcattgaacggggtatcctccttagccacggggcccgtcccatttgagcctgtcaatgtcaccactgaccgagaggtacctcctgcagtgtctgacatccgggtgacgcggtcctcacccagcagcttgagcctggcctgggctgttccccgggcacccagtggggctgtgctggactacgaggtcaaataccatgagaagggcgccgagggtcccagcagcgtgcggttcctgaagacgtcagaaaaccgggcagagctgcgggggctgaagcggggagccagctacctggtgcagagagcgagggctggcgggagcagctggccctgattgcgggcacggcagtcgtgggtgtggtcctggtcctggtggtcattgtggtcgcagttctctgcctcaggaagcagagcaatgggagagaagcagaatattcggacaaacacggacagtatctcatcggacatggtactaaggtctacatcgaccccttcacttatgaagaccctaatgaggctgtgagggaatttgcaaaagagatcgatgtctcctacgtcaag

SEQ ID NO: 109 - protein, 516 aa, Homo Sapiens
MELRVLLCWASLAAALEETLLNTKLETADLKWVTFPQVDGQWEELSGLDEEQHSVRTYEVCDVQRAPGQAHWLRTGWVPRRGAVHVYATLRFTMLECLSLPRAGRSCKETFTVFYYESDADTATALTPAWMENPYIKVDTVAAEHLTRKRPGAEATGKVNVKTLRLGPLSKAGFYLAFQDQGACMALLSLHLFYKKCAQLTVNLTRFPETVPRELVVPVAGSCVVDAVPAPGPSPSLYCREDGQWAEQPVTGCSCAPGFEAAEGNTKCRACAQGTFKPLSGEGSCQPCPANSHSNTIGSAVCQCRVGYFRARTDPRGAPCTTPPSAPRSVVSRLNGSSLHLEWSAPLESGGREDLTYALRCRECRPGGSCAPCGGDLTFDPGPRDLVEPWVVVRGLRPDFTYTFEVTALNGVSSLATGPVPFEPVNVTTDREVPPAVSDIRVTRSSPSSLSLAWAVPRAPSGAVLDYEVKYHEKGAEGPSSVRFLKTSENRAELRGLKRGASYLVQRARAGGSSWP

SEQ ID NO: 110 - DNA, 1801 bp, Homo Sapiens
actcagttcggatcctacccgagtgaggcggcgccatggagctccgggtgctgctctgctgggcttcgttggccgcagctttggaagagaccctgctgaacacaaaattggaaactgctgatctgaagtgggtgacattccctcaggtggacgggcagtgggaggaactgagcggcctggatgaggaacagcacagcgtgcgcacctacgaagtgtgtgacgtgcagcgtgccccgggccaggcccactggcttcgcacaggttgggtcccacggcggggcgccgtccacgtgtacgccacgctgcgcttcaccatgctcgagtgcctgtccctgcctcgggctgggcgctcctgcaaggagaccttcaccgtcttctactatgagagcgatgcggacacggccacggccctcacgccagcctggatggagaacccctacatcaaggtggacacggtggccgcggagcatctcacccggaagcgccctggggccgaggccaccgggaaggtgaatgtcaagacgctgcgtctgggaccgctcagcaaggctggcttctacctggccttccaggaccagggtgcctgcatggccctgctatccctgcacctcttctacaaaaagtgcgcccagctgactgtgaacctgactcgattcccggagactgtgcctcgggagctggttgtgcccgtggccggtagctgcgtggtggatgccgtccccgcccctggccccagccccagcctctactgccgtgaggatggccagtgggccgaacagccggtcacgggctgcagctgtgctccggggttcgaggcagctgaggggaacaccaagtgccgagcctgtgcccagggcaccttcaagcccctgtcaggagaagggtcctgccagccatgcccagccaatagccactctaacaccattggatcagccgtctgccagtgccgcgtcgggtacttccgggcacgcacagacccccggggtgcaccctgcaccacccctccttcggctccgcggagcgtggtttcccgcctgaacggctcctccctgcacctggaatggagtgcccccctggagtctggtggccgagaggacctcacctacgccctccgctgccgggagtgccgacccggaggctcctgtgcgccctgcgggggagacctgacttttgaccccggcccccgggacctggtggagccctgggtggtggttcgagggctacgtcctgacttcacctatacctttgagtacctcctgcagtgtctgacatccgggtgacgcggtcctcacccagcagcttgagcctggcctgggctgttccccgggcacccagtggggctgtgctggactacgaggtcaaataccatgagaagggcgccgagggtcccagcagcgtgcggttcctgaagacgtcagaaaaccgggcagagctgcgggggctgaagcggggagccagctacctggtgcaggtacgggcgcgctctgaggccggctacgggcccttcggccaggaacatcacagccagacccaactggatgagagcgagggctggcgggagcagctggccctgattgcgggcacggcagtcgtgggtgtggtcctggtcctggtggtcattgtggtcgcagttctctgcctcaggaagcagagcaatgggagagaagcagaatattcggacaaacacggacagtatctcatcggacatggtactaaggtctacatcgaccccttcacttatgaagaccctaatgaggctgtgagggaatttgcaaaagagatcgatgtctcctacgtcaag

SEQ ID NO: 111 - protein, 414 aa, Homo Sapiens
MELRVLLCWASLAAALEETLLNTKLETADLKWVTFPQVDGQWEELSGLDEEQHSVRTYEVCDVQRAPGQAHWLRTGWVPRRGAVHVYATLRFTMLECLSLPRAGRSCKETFTVFYYESDADTATALTPAWMENPYIKVDTVAAEHLTRKRPGAEATGKVNVKTLRLGPLSKAGFYLAFQDQGACMALLSLHLFYKKCAQLTVNLTRFPETVPRELVVPVAGSCVVDAVPAPGPSPSLYCREDGQWAEQPVTGCSCAPGFEAAEGNTKCRACAQGTFKPLSGEGSCQPCPANSHSNTIGSAVCQCRVGYFRARTDPRGAPCTTPPSAPRSVVSRLNGSSLHLEWSAPLESGGREDLTYALRCRECRPGGSCAPCGGDLTFDPGPRDLVEPWVVVRGLRPDFTYTFEYLLQCLTSG

SEQ ID NO: 112 - DNA, 965 bp, Homo Sapiens
atgtggagctggaagtgcctcctcttctgggctgtgctggtcacagccacactctgcaccgctaggccgtccccgaccttgcctgaacaagatgctctcccctcctcggaggatgatgatgatgatgatgactcctcttcagaggagaaagaaacagataacaccaaaccaaaccgtatgcccgtagctccatattggacatccccagaaaagatggaaaagaaattgcatgcagtgccggctgccaagacagtgaagttcaaatgcccttccagtgggaccccaaaccccacactgcgctggttggaaaatggcaaagaattcaaacctggccacagaattggaggctacaaggtccgttatgccacctggagcatcataatggactctgtggtgccctctgacaagggcaactacacctgcattgtggagaatgagtacggcagcatcaaccacacataccagctggatgtcgtggagcggtcccctcaccggcccatcctgcaagcagggttgcccgccaacaaaacagtggccctgggtagcaacgtggagttcatgtgtaaggtgtacagtgacccgcagccgcacatccagtggctaaagcacatcgaggtgaatgggagcaagattggcccggacaacctgccttatgtccagatcttgaagactgctggagttaataccaccgacaaagagatggaggtgcttcacttaagaaatgtctcctttgaggacgcaggggagtatacgtgcttggcgggtaactctatcggactctcccatcactctgcatggttgaccgttctggaaggtacacactgtaacttctcctctcgatgtcctgccctcgccacgggcacggggggagcatgcatttccaggcttggggagacacagaggcaggagagctggaagaatgggctcctgcctgcctggtgccacatcctgccccagctttgagg

SEQ ID NO: 113 - protein, 320 aa, Homo Sapiens [sequence omitted]

SEQ ID NO: 114 - DNA, 801 bp, Homo Sapiens
atggtcagctggggtcgtttcatctgcctggtcgtggtcaccatggcaaccttgtccctggcccggccctccttcagtttagttgaggataccacattagagccagaagagccaccaaccaaataccaaatctctcaaccagaagtgtacgtggctgcgccaggggagtcgctagaggtgcgctgcctgttgaaagatgccgccgtgatcagttggactaaggatggggtgcacttggggcccaacaataggacagtgcttattggggagtacttgcagataaagggcgccacgcctagagactccggcctctatgcttgtactgccagtaggactgtagacagtgaaacttggtacttcatggtgaatgtcacagatgccatctcatccggagatgatgaggatgacaccgatggtgcggaagattttgtcagtgagaacagtaacaacaagagagcaccatactggaccaacacagaaaagatggaaaagcggctccatgctgtgcctgcggccaacactgtcaagtttcgctgcccagccggggggaacccaatgccaaccatgcggtggctgaaaaacgggaaggagtttaagcaggagcatcgcattggaggctacaaggtacgaaaccagcactggagcctcattatggaaagtgtggtcccatctgacaagggaaattatacctgtgtggtggagaatgaatacgggtccatcaatcacacgtaccacctggatgttgtgggtgagtctgcctctcctcgtgtggcggctgcataccagcccattcttgcttga

SEQ ID NO: 115 - protein, 266 aa, Homo Sapiens [sequence omitted]

SEQ ID NO: 116 - DNA, 953 bp, Homo Sapiens
atggtcagctggggtcgtttcatctgcctggtcgtggtcaccatggcaaccttgtccctggcccggccctccttcagtttagttgaggataccacattagagccagaagagccaccaaccaaataccaaatctctcaaccagaagtgtacgtggctgcgccaggggagtcgctagaggtgcgctgcctgttgaaagatgccgccgtgatcagttggactaaggatggggtgcacttggggcccaacaataggacagtgcttattggggagtacttgcagataaagggcgccacgcctagagactccggcctctatgcttgtactgccagtaggactgtagacagtgaaacttggtacttcatggtgaatgtcacagatgccatctcatccggagatgatgaggatgacaccgatggtgcggaagattttgtcagtgagaacagtaacaacaagagagcaccatactggaccaacacagaaaagatggaaaagcggctccatgctgtgcctgcggccaacactgtcaagtttcgctgcccagccggggggaacccaatgccaaccatgcggtggctgaaaaacgggaaggagtttaagcaggagcatcgcattggaggctacaaggtacgaaaccagcactggagcctcattatggaaagtgtggtcccatctgacaagggaaattatacctgtgtggtggagaatgaatacgggtccatcaatcacacgtaccacctggatgttgtggagcgatcgcctcaccggcccatcctccaagccggactgccggcaaatgcctccacagtggtcggaggagacgtagagtttgtctgcaaggtttacagtgatgcccagccccacatccagtggatcaagcacgtggaaaagaacggcagtaaatacgggcccgacgggctgccctacctcaaggttctcaaggtgaggactttctg

SEQ ID NO: 117 - protein, 317 aa, Homo Sapiens
MVSWGRFICLVVVTMATLSLARPSFSLVEDTTLEPEEPPTKYQISQPEVYVAAPGESLEVRCLLKDAAVISWTKDGVHLGPNNRTVLIGEYLQIKGATPRDSGLYACTASRTVDSETWYFMVNVTDAISSGDDEDDTDGAEDFVSENSNNKRAPYWTNTEKMEKRLHAVPAANTVKFRCPAGGNPMPTMRWLKNGKEFKQEHRIGGYKVRNQHWSLIMESVVPSDKGNYTCVVENEYGSINHTYHLDVVERSPHRPILQAGLPANASTVVGGDVEFVCKVYSDAQPHIQWIKHVEKNGSKYGPDGLPYLKVLKVRTF

SEQ ID NO: 118 - DNA, 844 bp, Homo Sapiens
atggtcagctggggtcgtttcatctgcctggtcgtggtcaccatggcaaccttgtccctggcccggccctccttcagtttagttgaggatatcacattagagccagaaggagcaccatactggaccaacacagaaaagatggaaaagcggctccatgctgtgcctgcggccaacactgtcaagtttcgctgcccagccggggggaacccaatgccaaccatgcggtggctgaaaaacgggaaggagtttaagcaggagcatcgcattggaggctacaaggtacgaaaccagcactggagcctcattatggaaagtgtggtcccatctgacaagggaaattatacctgtgtggtggagaatgaatacgggtccatcaatcacacgtaccacctggatgttgtggagcgatcgcctcaccggcccatcctccaagccggactgccggcaaatgcctccacagtggtcggaggagacgtagagtttgtctgcaaggtttacagtgatgcccagccccacatccagtggatcaagcacgtggaaaagaacggcagtaaatacgggcccgacgggctgccctacctcaaggttctcaaggccgccggtgttaacaccacggacaaagagattgaggttctctatattcggaatgtaacttttgaggacgctggggaatatacgtgcttggcgggtaattctattgggatatcctttcactccgcatggttgacagttctgccaggtatatactgttctttctctctgggtttttttcctttttcttggttgactgctataaaattaacacagcttctgttatcagaaatggccccttttatccttgcat

SEQ ID NO: 119 - protein, 281 aa, Homo Sapiens [sequence omitted]

SEQ ID NO: 120 - DNA, 1191 bp, Homo Sapiens
atggtcagctggggtcgtttcatctgcctggtcgtggtcaccatggcaaccttgtccctggcccggccctccttcagtttagttgaggataccacattagagccagaagagccaccaaccaaataccaaatctctcaaccagaagtgtacgtggctgcgccaggggagtcgctagaggtgcgctgcctgttgaaagatgccgccgtgatcagttggactaaggatggggtgcacttggggcccaacaataggacagtgcttattggggagtacttgcagataaagggcgccacgcctagagactccggcctctatgcttgtactgccagtaggactgtagacagtgaaacttggtacttcatggtgaatgtcacagatgccatctcatccggagatgatgaggatgacaccgatggtgcggaagattttgtcagtgagaacagtaacaacaagagagcaccatactggaccaacacagaaaagacggaaaagcggctccatgctgtgcctgcggccaacactgtcaagtttcgctgcccagccggggggaacccaatgccaaccatgcggtggctgaaaaacgggaaggagtttaagcaggagcatcgcattggaggctacaaggtacgaaaccagcactggagcctcattatggaaagtgtggtcccatctgacaagggaaattatacctgtgtggtggagaatgaatacgggtccatcaatcacacgtaccacctggatgttgtggagcgatcgcctcaccggcccatcctccaagccggactgccggcaaatgcctccacagtggtcggaggagacgtagagtttgtctgcaaggtttacagtgatgcccagccccacatccagtggatcaagcacgtggaaaagaacggcagtaaatacgggcccgacgggctgccctacctcaaggttctcaaggccgccggtgttaacaccacggacaaagagattgaggttctctatattcggaatgtaacttttgaggacgctggggaatatacgtgcttggcgggtaattctattgggatatcctttcactctgcatggttgacagttctgccaggtatatactgttctttctctctgggtttttttcccttttcttggttgactgctataaaattaacacagcttctgttatcagaaatggccccttttatccttgcataa

SEQ ID NO: 121 - protein, 396 aa, Homo Sapiens [sequence omitted]

SEQ ID NO: 122 - DNA, 1240 bp, Homo Sapiens
atgaaggcccccgctgtgcttgcacctggcatcctcgtgctcctgtttaccttggtgcagaggagcaatggggagtgtaaagaggcactagcaaagtccgagatgaatgtgaatatgaagtatcagcttcccaacttcaccgcggaaacacccatccagaatgtcattctacatgagcatcacattttccttggtgccactaactacatttatgttttaaatgaggaagaccttcagaaggttgctgagtacaagactgggcctgtgctggaacacccagattgtttcccatgtcaggactgcagcagcaaagccaatttatcaggaggtgtttggaaagataacatcaacatggctctagttgtcgacacctactatgatgatcaactcattagctgtggcagcgtcaacagagggacctgccagcgacatgtctttccccacaatcatactgctgatatacagtcggaggttcactgcatattctccccacagatagaagagcccagccagtgtcctgactgtgtggtgagcgccctgggagccaaagtcctttcatctgtaaaggaccggttcatcaacttctttgtaggcaataccataaattcttcttatttcccagatcatccattgcattcgatatcagtgagaaggctaaaggaaacgaaagatggttttatgtttttgacggaccagtcctacattgatgttttacctgagttcagagattcttaccccattaagtatgtccatgcctttgaaagcaacaattttatttacttcttgacggtccaaagggaaactctagatgctcagacttttcacacaagaataatcaggttctgttccataaactctggattgcattcctacatggaaatgcctctggagtgtattctcacagaaaagagaaaaaagagatccacaaagaaggaagtgttaaatatacttcaggctgcgtatgtcagcaagcctggggcccagcttgctaggcaaataggagccagcctgaatgatgacattcttttcggggtgttcgcacaaagcaagccagattctgccgaaccaatggatcgatctgccatgtgtgcattccctatcaaatatgtcaacgacttcttcaacaagatcgtcaacaaaaacaatgtgagatgtctccagcatttttacggacccaatcatgagcactgctttaatagggtaagtcacatcagttccccacttataaactgtgaggtat

SEQ ID NO: 123 - protein, 413 aa, Homo Sapiens [sequence omitted]

SEQ ID NO: 124 - DNA, 1405 bp, Homo Sapiens
atgaaggcccccgctgtgcttgcacctggcatcctcgtgctcctgtttaccttggtgcagaggagcaatggggagtgtaaagaggcactagcaaagtccgagatgaatgtgaatatgaagtatcagcttcccaacttcaccgcggaaacacccatccagaatgtcattctacatgagcatcacattttccttggtgccactaactacatttatgttttaaatgaggaagaccttcagaaggttgctgagtacaagactgggcctgtgctggaacacccagattgtttcccatgtcaggactgcagcagcaaagccaatttatcaggaggtgtttggaaaaataacatcaacatggctctagttgtcgacacctactatgatgatcaactcattagctgtggcagcgtcaacagagggacctgccagcgacatgtctttccccacaatcatactgctgacatacagtcggaggttcactgcatattctccccacagatagaagagcccagccagtgtcctgactgtgtggtgagcgccctgggagccaaagtcctttcatctgtaaaggaccggttcatcaacttctttgtaggcaataccataaattcttcttatttcccagatcatccattgcattcgatatcagtgagaaggctaaaggaaacgaaagatggttttatgtttttgacggaccagtcctacattgatgttttacctgagttcagagattcttaccccattaagtatgtccatgcctttgaaagcaacaattttatttacttcttgacggtccaaagggaaactctagatgctcagacttttcacacaagaataatcaggttctgttccataaactctggattgcattcctacatggaaatgcctctggagtgtattctcacagaaaagagaaaaaagagatccacaaagaaggaagtgtttaatatacttcaggctgcgtatgtcagcaagcctggggcccagcttgctagacaaataggagccagcctgaatgatgacattcttttcggggtgttcgcacaaagcaagccagattctgccgaaccaatggatcgatctgccatgtgtgcattccctatcaaatatgtcaacgacttcttcaacaagatcgtcaacaaaaacaatgtgagatgtctccagcatttttacggacccaatcatgagcactgctttaataggacacttctgagaaattcatcaggctgtgaagcgcgccgtgatgaatatcgaacagagtttaccacagctttgcagcgcgttgacttattcatgggtcaattcagcgaagtcctcttaacatctatatccaccttcattaaaggagacctcaccatagctaatcttgggacatcagagggtcgcttcatgcaggtaagtgctttct

SEQ ID NO: 125 - protein, 468 aa, Homo Sapiens [sequence omitted]

SEQ ID NO: 126 - DNA, 1557 bp, Homo Sapiens
atgaaggcccccgctgtgcttgcacctggcatcctcgtgctcctgtttaccttggtgcagaggagcaatggggagtgtaaagaggcactagcaaagtccgagatgaatgtgaatatgaagtatcagcttcccaacttcaccgcggaaacacccatccagaatgtcattctacatgagcatcacattttccttggtgccactaactacatttatgttttaaatgaggaagaccttcagaaggttgctgagtacaagactgggcctgtgctggaacacccagattgtttcccatgtcaggactgcagcagcaaagccaatttatcaggaggtgtttggaaagataacattaacatggctctagttgtcgacacctactatgatgatcaactcattagctgtggcagcgtcaacagagggacctgccagcgacatgtctttccccacaatcatactgctgacatacagtcggaggttcactgcatattctccccacagatagaagagcccagccagtgtcctgactgtgtggtgagcgccctgggagccaaagtcctttcatctgtaaaggaccggttcatcaacttctttgtaggcaataccataaattcttcttatttcccagatcatccattgcattcgatatcagtgagaaggctaaaggaaacgaaagatggttttatgtttttgacggaccagtcctacattgatgttttacctgagttcagagattcttaccccattaagtatgtccatgcctttgaaagcaacaattttatttacttcttgacggtccaaagggaaactctagatgctcagacttttcacacaagaataatcaggttctgttccataaactctggattgcattcctacatggaaatgcctctggagtgtattctcacagaaaagagaaaaaagagatccacaaagaaggaagtgtttaatatacttcaggctgcgtatgtcagcaagcctggggcccagcttgctagacaaataggagccagcctgaatgatgtcattcttttcggggtgttcgcacaaagcaagccagattctgccgaaccaatggatcgatctgccatgtgtgcattccctatcaaatatgtcaacgacttcttcaacaagatcgtcaacaaaaacaatgtgagatgtctccagcatttttacggacccaatcatgagcactgctttaataggacacttctgagaaattcatcaggctgtgaagcgcgccgtgatgaatatcgaacagagtttaccacagctttgcagcgcgttgacttattcatgggtcaattcagcgaagtcctcttaacatctatatccaccttcattaaaggagacctcaccatagctaatcttgggacatcagagggtcgcttcatgcaggttgtggtttctcgatcaggaccatcaacccctcatgtgaattttctcctggactcccatccagtgtctccagaagtgattgtggagcatacattaaaccaaaatgactacacactggttatcactgggaaggaggtaagctgttcccacagggaatttccatga

SEQ ID NO: 127 - protein, 518 aa, Homo Sapiens [sequence omitted]

SEQ ID NO: 128 - DNA, 1789 bp, Homo Sapiens
atgaaggcccccgctgtgcttgcacctggcatcctcgtgctcctgtttaccttggtgcagaggagcaatggggagtgtaaagaggcactagcaaagtccgagatgaatgtgaatatgaagtatcagcttcccaacttcaccgcggaaacacccatccagaatgtcattctacatgagcatcacattttccttggtgccactaactacatttatgttttaaatgaggaagaccttcagaaggttgctgagtacaagactgggcctgtgctggaacacccagattgtttcccatgtcaggactgcagcagcaaagccaatttatcaggaggtgtttggaaagataacatcaacatggctctagttgtcgacacctactatgatgatcaactcattagctgtggcagcgtcaacagagggacctgccagcgacatgtctttccccacaatcatactgctgacatacagtcggaggttcactgcatattctccccacagatagaagagcccagccagtgtcctgactgtgtggtgagcgccctgggagccaaagtcctttcatctgtaaaggaccggttcatcaacttctttgtaggcaataccataaattcttcttatttcccagatcatccattgcattcgatatcagtgagaaggctaaaggaaacgaaagatggttttatgtttttgacggaccagtcctacattgatgttttacctgagttcagagattcttaccccattaagtatgtccatgcctttgaaagcaacaattttatttacttcttgacggtccaaagggaaactctagatgctcagacttttcacacaagaataatcaggttctgttccataaactctggattgcattcctacatggaaatgcctctggagtgtattctcacagaaaagagaaaaaagagatccacaaagaaggaagtgtttaatatacttcaggctgcgtatgtcagcaagcctggggcccagcttgctagacaaataggagccagcccgaatgatgacattcttttcggggtgttcgcacaaagcaagccagattctgccgaaccaatggatcgatctgccatgtgtgcattccctatcaaatatgtcaacgacttcttcaacaagatcgtcaacaaaaacaatgtgagatgtctccagcatttttacggacccaatcatgagcactgctttaataggacacttctgagaaattcatcaggctgtgaagcgcgccgtgatgaatatcgaacagagtttaccacagctttgcagcgcgttgacttattcatgggtcaattcagcgaagtcctcttaacatctatatccaccttcattaaaggagacctcaccatagctaatcttgggacatcagagggtcgcttcatgcaggttgtggtttctcgatcaggaccatcaacccctcatgtgaattttctcctggactcccatccagtgtctccagaagtgattgtggagcatacattaaaccaaaatggctacacactggttatcactgggaagaagatcacgaagatcccattgaatggcttgggctgcagacatttccagtcctgcagtcaatgcctctctgccccaccctttgttcagtgtggctggtgccacgacaaatgtgtgcgatcggaggaatgcctgagcgggacatggactcaacagatctgtctgcctgcaatctacaaggtaggaatctctaacagctggcatacatgtttttgtttggtgttttttttttttttttggtttggtttggtttgttttttgttttttt

SEQ ID NO: 129 - protein, 596 aa, Homo Sapiens [sequence omitted]

SEQ ID NO: 130 - DNA, 1936 bp, Homo Sapiens
atgaaggcccccgctgtgcttgcacctggcatcctcgtgctcctgtttaccttggtgcagaggagcaatggggagtgtaaagaggcactagcaaagtccgagatgaatgtgaatatgaagtatcggcttcccaacttcaccgcggaaacacccatccagaatgtcattctacatgagcatcacattttccttggtgccactaactacatttatgttttaaatgaggaagaccttcagaaggttgctgagtacaagactgggcctgtgctggaacacccagattgtttcccatgtcaggactgcagcagcaaagccaatttatcaggaggtgtttggagagataacatcaacatggctctagttgtcgacacctactatgatgatcaactcattagctgtggcagcgtcaacagagggacctgccagcgacatgcctttccccacaatcatactgctgacatacagtcggaggttcactgcatattctccccacagatagaagatcccagccagtgtcctgactgtgtggtgagcgccctgggagccaaagtcctttcatctgtaaaggaccggttcatcaacttctttgtaggcaataccataaattcttcttatttcccagatcatccattgcattcgatatcattgagaaggctaaaggaaacgaaagatggttttatgtttttgacggaccagtcctacattgatgttttacctgagttcagagattcttaccccattaagtatgtccatgcctttgaaagcaacaattttatttacttcttgacggtccaaagggaaactctagatgctcagacttttcacgcaagaataatcaggttctgttccataaactctggattgcattcctacatggaaatgcctctggagtgtattctcacagagaagagaaaaaagagatccacaaagaaggaagtgtttaatatacttcaggctgcgtatgtcagcaagcctggggcccagcttgctagacaaataggagccagcctgaatgatgacattcttttcggggtgttcgcacaaagcaagccagattctgccgaaccaatggatcgatctgccatgtgtgcattccctatcaaatatgtcaacgacttcttcaacaagatcgtcaacaaaaacaatgtgagatgtctccagcatttttacggacccaatcatgagcactgctttaatagggcagaaaatgtgctagattggaggtgaagaccctggagccagagagcctaggcttagtcctagccctgcactgaagacacttctgagaaattcatcaggctgtgaagcgcgccgtgatgaatatcgaacagagtttaccacagctttgcagcgcgttgacttattcatgggtcaattcagcgaagtcctcttaacatctatatccaccttcattaaaggagacctcaccatagctaatcttgggacatcagagggtcgcttcatgcaggttgtggtttctcgatcaggaccatcaacccctcatgtgaattttctcctggactcccatccagtgtctccagaagtgattgtggagcatacattaaaccaaaatggctacacactggttatcactgggaagaagatcacgaagatcccattgaatggcttgggctgcagacatttccagtcctgcagtcaatgcctctctgccccaccctttgttcagtgtggctggtgccacaacaaatgtgtgcgatcggaggaatgcctgagcgggacatggactcaacagatctgtctgcctgcaatctacaaggtaggaatctctaacagctggcatacatgtttttgtttggtgttttttttttttttttggtttggtttggtttgttttttgtttttttagatacaaatcccactaatgaaaaaaatttaaaaatcaatttactcatttagctgtgagtcatcagctaaa

SEQ ID NO: 131 - protein, 408 aa, Homo Sapiens [sequence omitted]

SEQ ID NO: 132 - DNA, 1888 bp, Homo Sapiens
atgaaggcccccgctgtgcttgcacctggcatcctcgtgctcctgtttaccttggtgcagaggagcaatggggagtgtaaagaggcactagcaaagtccgagatgaatgtgaatatgaagtatcagcttcccaacttcaccgcggaaacacccatccagaatgtcattctacatgagcatcacattttccttggtgccactaactacatttatgttttaaatgaggaagaccttcagaaggttgctgagtacaagactgggcctgtgctggaacacccagattgtttcccatgtcaggactgcagcagcaaagccaatttatcaggaggtgtttggaaagataacatcaacatggctctagttgtcgacacctactatgatgatcaactcattagctgtggcagcgtcaacagagggacctgccagcgacatgtctttccccacaatcatactgctgacatacagtcggaggctcactgcatattctccccacagatagaagagcccagtcagtgtcctgactgtgtggtgagcgccctgggagccaaagtcctttcatctgtaaaggaccggttcatcaacttctttgtaggcaataccataaattcttcttatttcccagatcatccattgcattcgatatcagtgagaaggctaaaggaaacgaaagatggttttatgtttttgacggaccagtcctacattgatgttttacctgagttcagagattcttaccccattaagtatgtccatgcctttgaaagcaacaattttatttacttcttgacggtccaaagggaaactctagatgctcagacttttcacacaagaataatcaggttctgttccataaactctggattgcattcctacatggaaatgcctctggagtgtattctcacagaaaagagaaaaaagagatccacaaagaaggaagtgtttaatatacttcaggctgcgtatgtcagcaagcctggggcccagcttgctagacaaataggagccagcctgaatgatgacattcttttcggggtgttcgcacaaagcaagccagattctgccgaaccaatggatcgatctgccatgtgtgcattccctatcaaatatgtcaacgacttcttcaacaagatcgtcaacaaaaacaatgtgagatgtctccagcatttttacggacccaatcatgagcactgctttaataggacacttctgagaaattcatcaggctgtgaagcgcgccgtgatgaatatcgaacagagtttaccacagctttgcagcgcgttgacttattcatgggtcaattcagcgaagtcctcttaacatctatatccaccttcattaaaggagacctcaccatagctaatcttgggacatcagagggtcgcttcatgcaggttgtggtttctcgatcaggaccatcaacccctcatgtgaattttctcctggactcccatccagtgtctccagaagtgattgtggagcatacattaaaccaaaatggctacacactggttatcactgggaagaagatcacgaagatcccattgaatggcttgggctgcagacatttccagtcctgcagtcaatgcctctctgccccaccctttgttcagtgtggctggtgccacgacaaatgtgtgcgatcggaggaatgcctgagcgggacatggactcaacagatctgtctgcctgcaatctacaaggttttcccaaatagtgcaccccttgaaggagggacaaggctgaccatatgtggctgggactttggatttcggaggaataataaatttgatttaaagaaaactagagttctccttggaaatgagagctgcaccttgactttaagtgagagcacgatgaatacgtaaggatcttaaaatgctttgctgg

SEQ ID NO: 133 - protein, 621 aa, Homo Sapiens [sequence omitted]

SEQ ID NO: 134 - DNA, 1995 bp, Homo Sapiens
atgaaggcccccgctgtgcttgcacctggcatcctcgtgctcctgtttaccttggtgcagaggagcaatggggagtgtaaagaggcactagcaaagtccgagatgaatgtgaatatgaagtatcagcttcccaacttcaccgcggaaacacccatccagaatgtcattctacatgagcatcacattttccttggtgccactaactacatttatgttttaaatgaggaagaccttcagaaggttgctgagtacaagactgggcctgtgctggaacacccagattgtttcccatgtcaggactgcagcagcaaagccaatttatcaggaggtgtttggaaagataacatcaacatggctctagttgtcgacacctactatgatgatcaactcattagctgtggcagcgtcaacagagggacctgccagcgacatgtctttccccacaatcatactgctgacatacagtcggaggttcactgcatattctccccacagatagaagagcccagccagtgtcctgactgtgtggtgagcgccctgggagccaaagtcctttcatctgtaaaggaccggttcatcaacttctttgtaggcaataccataaattcttcttatttcccagatcatccattgcattcgatatcagtgagaaggctaaaggaaacgaaagatggttttatgtttttgacggaccagtcctacattgatgttttacctgagttcagagattcttaccccattaagtatgtccatgcctttgaaagcaacaattttatttacttcttgacggtccaaagggaaactctagatgctcagacttttcacacaagaataatcaggttctgttccataaactctggattgcattcctacatggaaatgcctctggagtgtattctcacagaaaagagaaaaaagagatccacaaagaaggaagtgtttaatatacttcaggctgcgtatgtcagcaagcctggggcccagcttgctagacaaataggagccagcctgaatgatgacattcttttcggggtgttcgcacaaagcaagccagattctgccgaaccaatggatcgatctgccatgtgtgcattccctatcaaatatgtcaacgacttcttcaacaagatcgtcaacaaaaacaatgtgagatgtctccagcatttttacggacccaatcatgagcactgctttaataggacacttctgagaaattcatcaggctgtgaagcgcgccgtgatgaatatcgaacagagtttaccacagctttgcagcgcgttgacttattcatgggtcaattcagcgaagtcctcttaacatctatatccaccttcattaaaggagacctcaccatagctaatcttgggacatcagagggtcgcttcatgcaggttgtggtttctcgatcaggaccatcaacccctcatgtgaattttctcatggactcccatccagtgtctccagaagtgattgtggagcatacattaaaccaaaatggctacacactggttatcactgggaagaagatcacgaagatcccattgaatggcttgggctgcagacatttccagtcctgcagtcaatgcctctctgccccaccctttgttcagtgtggctggtgccacgacaaatgtgtgcgatcggaggaatgcctgagcgggacatggactcaacagatctgtctgcctgcaatctacaaggttttcccaaatagtgcaccccttgaaggagggacaaggctgaccatatgtggctgggactttggatttcggaggaataataaatttgatttaaagaaaactagagttctccttggaaatgagagctgcaccttgactttaagtgagagcacgatgaatacattgaaatgcacagttggtcctgccatgaataagcatttcaatatgtccataattatttcaaatggccacgggacaacacaatacagtacattctcctatgtggtaaggaagattctatcctatcatgtttga

SEQ ID NO: 135 - protein, 664 aa, Homo Sapiens [sequence omitted]

SEQ ID NO: 136 - DNA, 2170 bp, Homo Sapiens
atgaaggcccccgctgtgcttgcacctggcatcctcgtgctcctgtttaccctggtgcagaggagcaatggggagtgtaaagaggcactagcaaagtccgagatgaatgtgaatatgaagtatcagcttcccaacttcaccgcggaaacacccatccagaatgtcattctacatgagcatcacattttccttggtgccactaactacatttatgttttaaatgaggaagaccttcagaaggttgctgagtacaagactgggcctgtgctggaacacccagattgtttcccatgtcaggactgcagcagcaaagccaatttatcaggaggtgtttggaaagataacatcaacatggctctagttgtcgacacctactatgatgatcaactcattagctgtggcagcgtcaacagagggacctgccagcgacatgtctttccccacaatcatcctgctgacatacagtcggaggttcactgcatattctccccacagatagaagagcccagccagtgtcctgactgtgtggtgagcgccctgggagccaaagtcctttcatctgtaaaggaccggttcatcaacttctttgtaggcaataccataaattcttcttatttcccagatcatccattgcattcgatatcagtgagaaggctaaaggaaacgaaagatggttttatgtttttgacggaccagtcctacattgatgttttacctgagttcagagattcttaccccattaagtatgtccatgcctttgaaagcaacaattttatttacttcttgacggtccaaagggaaactctagatgctcagacttttcacacaagaataatcaggttctgttccataaactctggattgcattcctacatggaaatgcctctggagtgtattctcacagaaaagagaaaaaagagatccacaaagaaggaagtgtttaatatacttcaggctgcgtatgttagcaagcctggggcccagcttgctagacaaataggagccagcctgaatgatgacattcttttcggggtgttcgcacaaagcaagccagattctgccgaaccaatggatcgatctgccatgtgtgcattccctatcaaatatgtcaacgacttcttcaacaagatcgtcaacaaaaacaatgtgagatgtctccagcatttttacggacccaatcatgagcactgctttaataggacacttctgagaaattcatcaggctgtgaagcgcgccgtgatgaatatcgaacagagtttaccacagctttgcagcgcgttgacttattcatgggtcaattcagcgaagtcctcttaacatctatatccaccttcattaaaggagacctcaccatagctaatcttgggacatcagagggtcgcttcatgcaggttgtggtttctcgatcaggaccatcaacccctcatgtgaattttctcctggactcccatccagtgtctccagaagtgattgtggagcatacattaaaccaaaatggccacacactggttatcactgggaagaagatcacgaagatcccattgaatggcttgggctgcagacatttccagtcctgcagtcaatgcctctctgccccaccctttgttcagtgtggctggtgccacgacaaatgtgtgcgatcggaggaatgcctgagcgggacatggactcaacagatctgtctgcctgcaatctacaaggttttcccaaatagtgcaccccttgaaggagggacaaggctgaccatatgtggctgggactttggatttcggaggaataataaatttgatttaaagaaaactagagttctccttggaaatgagagctgcaccttgactttaagtgagagcacgatgaatacattgaaatgcacagttggtcctgccatgaataagcatttcaatatgtccataattatttcaaatggccacgggacaacacaatacagtacattctcctatgtggatcctgtaataacaagtatttcgccgaaatacggtcctatggctggtggcactttacttactttaactggaaattacctaaacagtgggaattctagacacatttcaattggtggaaaaacatgtactttaaaaaggtgttgtaaatttattttttgttgcatctgtcaatttgaattaatatctgtaccttaaaaattaagca

SEQ ID NO: 137 - protein, 719 aa, Homo Sapiens [sequence omitted]

SEQ ID NO: 138 - DNA, 2194 bp, Homo Sapiens
atgaaggcccccgctgtgcttgcacctggcatcctcgtgctcctgtttaccttggtgcagaggagcaatggggagtgtaaagaggcactagcaaagtccgagatgaatgcgaatatgaagtatcagcttcccaacttcaccgcggaaacacccatccagaatgtcattctacatgagcatcacattttccttggtgccactaactacatttatgttttaaatgaggaagaccttcagaaggttgctgagtacaagactgggcctgtgctggaacacccagattgtttcccatgtcaggactgcagcagcaaagccaatttatcaggaggtgtttggaaagataacatcaacatggctctagttgtcgacacctactatgatgatcaactcattagctgtggcagcgtcaacagagggacctgccagcgacatgtctttccccacaatcatactgctgacatacagtcggaggttcactgcatattctccccacagatagaagagcccagccagtgtcctgactgtgtggtgagcgccctgggagccaaagtcctttcatctgtaaaggaccggttcatcaacttctttgtaggcaataccataaattcttcttatttcccagatcatccattgcattcgatatcagtgaggaggctaaaggaaacgaaagatggttttatgtttttgacggaccagtcctacattgatgttttacctgagttcagagattcttaccccattaagtatgtccatgcctttgaaagcaacaattttatttacttcttgacggtccaaagggaaactctagatgctcagacttttcacacaagaataatcaggttctgttccataaactctggattgcattcctacatggaaatgcctctggagtgtattctcacagaaaagagaaaaaagagatccacaaagaaggaagtgtttaatatacttcaggctgcgtatgtcagcaagcctggggcccagcttgctagacaaataggagccagcctgaatgatgacattcttttcggggtgttcgcacaaagcaagccagattctgccgaaccaatggatcgatctgccatgtgtgcattccctatcaaatatgtcaacgacttcttcaacaagatcgtcaacaaaaacaatgtgagatgtctccagcatttttacggacccaatcatgagcactgctttaataggacacttctgagaaattcatcaggctgtgaagcgcgccgtgatgaatatcgaacagagtttaccacagctttgcagcgcgttgacttattcatgggtcaattcagcgaagtcctcttaacatctatatccaccttcattaaaggagacctcaccatagctaatcttgggacatcagagggtcgcttcatgcaggttgtggtttctcgatcaggaccatcaacccctcatgtgaattttctcctggactcccatccagtgtctccagaagtgattgtggagcatacattaaaccaaaatggctacacactggttatcactgggaagaagatcacgaagaccccattgaatggcttgggctgcagacatttccagtcctgcagtcaatgcctctctgccccaccctttgttcagtgtggctggtgccacgacaaatgtgtgcgatcggaggaatgcctgagcgggacatggactcaacagatctgtctgcctgcaatctacaaggttttcccaaatagtgcaccccttgaaggagggacaaggctgaccatatgtggctgggactttggatttcggaggaataataaatttgatttaaagaaaactagagttctccttggaaatgagagctgcaccttgactttaagtgagagcacgatgaatacattgaaatgcacagttggtcctgccatgaataagcatttcaatatgtccataattatttcaaatggccacgggacaacacagtacagtacattctcctatgtgttactttgttttgtttttatctcccctccaggatcctgtaataacaagtatttcgccgaaatacggtcctatggctggtggcactttacttactttaactggaaattacctaaacagtgggaattctagacacatttcaattggtggaaaaacatgtactttaaaaaggtgttgtaaatttattttttgttgcatctgtcaatttgaattaatatctgtaccttaaaaa

SEQ ID NO: 139 - protein, 697 aa, Homo Sapiens [sequence omitted]

SEQ ID NO: 140 - DNA, 2082 bp, Homo Sapiens
aatgaaggcccccgctgtgcttgcacctggcatcctcgtgctcctgtttaccttggtgcagaggagcaatggggagtgtaaagaggcactagcaaagtccgagatgaatgtgaatatgaagtatcagcttcccaacttcaccgcggaaacacccatccagaatgtcattctacatgagcatcacattttccttggtgccactaactacatttatgttttaaatgaggaagaccttcagaaggttgctgagtacaagactgggcctgtgctggaacacccagattgtttcccatgtcaggactgcagcagcaaagccaatttatcaggaggtgtttggaaagataacatcaacatggctctagttgtcgacacctactatgatgatcaactcattagctgtggcagcgtcaacagagggacctgccagcgacatgtctttccccacaatcatactgctgacatacagtcggaggttcactgcatattctccccacagatagaagagcccagccagtgtcctgactgtgtggtgagcgccctgggagccaaagtcctttcatctgtaaaggaccggttcatcaacttctttgtaggcaataccataaattcttcttatttcccagatcatccattgcattcgatatcagtgagaaggctaaaggaaacgaaagatggttttatgtttttgacggaccagtcctacattgatgttttacctgagttcagagattcttaccccattaagtatgtccatgcctttgaaagcaacaattttatttacttcttgacggtccaaagggaaactctagatgctcagacttttcacacaagaataatcaggttctgttccataaactctggattgcattcctacatggaaatgcctctggagtgtattctcacagaaaagagaaaaaagagatccacaaagaaggaagtgtttaatatacttcaggctgcgtatgtcagcaagcctggggcccagcttgctagacaaataggagccagcctgaatgatgacattcttttcggggtgttcgcacaaagcaagccagattctgccgaaccaatggatcgatctgccatgtgtgcattccctatcaaatatgtcaacgacttcttcaacaagatcgtcaacaaaaacaatgtgagatgtctccagcatttttacggacccaatcatgagcactgctttaataggacacttctgagaaattcatcaggctgtgaagcgcgccgtgatgaatatcgaacagagtttaccacagctttgcagcgcgttgacttattcatgggtcaattcagcgaagtcctcttaacatctatatccaccttcattaaaggagacctcaccatagctaatcttgggacatcagagggtcgcttcatgcaggttgtggtttctcgatcaggaccatcaacccctcatgtgaattttctcctggactcccatccagtgtctccagaagtgattgtggagcatacattaaaccaaaatggctacacactggttatcactgggaagaagtgtggctggcgccacgacaaatgtgtgcgatcggaggaatgcctgagcgggacatggactcaacagatctgtctgcctgcaatctacaaggttttcccaaatagtgcaccccttgaaggagggacaaggctgaccatatgtggctgggactttggatttcggaggaataataaatttgatttaaagaaaactagagttctccttggaaatgagagctgcaccttgactttaagtgagagcacgatgaatacattgaaatgcacagttggtcctgccatgaataagcatttcaatatgtccataattatttcaaatggccacgggacaacacaatacagtacattctcctatgtggatcctgtaataacaagtatttcgccgaaatacggtcctatggctggtggcactttacttactttaactggaaattacctaaacagtgggaattctagacacatttcaattggtggaaaaacatgtactctaaaaaggtgtggtaaatttattttttgttgcatctgtcaatttgaattaatatctgtaccttaaaaatt

SEQ ID NO: 141 - protein, 691 aa, Homo Sapiens [sequence omitted]

SEQ ID NO: 142 - DNA, 2294 bp, Homo Sapiens
atgaaggcccccgctgtgcttgcacctggcatcctcgtgctcctgtttaccttggtgcagaggagcaatggggagtgtaaagaggcactagcaaagtccgagatgaatgtgaatatgaagtatcagcttcccaacttcaccgcggaaacacccatccagaatgtcattctacatgagcatcacattttccttggtgccactaactacatttatgttttaaatgaggaagaccttcagaaggttgctgagtacaagactgggcctgtgctggaacacccagattgtttcccatgtcaggactgcagcagcaaagccaatttatcaggaggtgtttggaaagataacatcaacatggctctagttgtcgacacctactatgatgatcaactcattagctgtggcagcgtcaacagagggacctgccagcgacatgtctttccccacaatcatactgctgacatacagtcggaggttcactgcatattctccccacagatagaagagcccagccagtgtcctgactgtgtggtgagcgccctgggagccaaagtcctttcatctgtaaaggaccggttcatcaacttctttgtaggcaataccataaattcttcttatttcccagatcatccattgcattcgatatcagtgagaaggctaaaggaaacgaaagatggttttatgtttttgacggaccagtcctacattgatgttttacctgagttcagagattcttaccccattaagtatgtccatgcctttgaaagcaacaattttatttacttcttgacggtccaaagggaaactctagatgctcagacttttcacacaagaataatcaggttctgttccataaactctggattgcattcctacatggaaatgcctctggagtgtattctcacagaaaagagaaaaaagagatccacaaagaaggaagtgtttaatatacttcaggctgcgtatgtcagcaagcctggggcccagcttgctagacaaataggagccagcctgaatgatgacattcttttcggggtgttcgcacaaagcaagccagattctgccgaaccaatggatcgatctgccatgtgtgcattccctatcaaatatgtcaacgacttcttcaacaagatcgtcaacaaaaacaatgtgagatgtctccagcatttttacggacccaatcatgagcactgctttaataggacacttctgagaaattcatcaggctgtgaagcgcgccgtgatgaatatcgaacagagtttaccacagctttgcagcgcgttgacttattcatgggtcaattcagcgaagtcctcttaacatctatatccaccttcattaaaggagacctcaccatagctaatcttgggacatcagagggtcgcttcatgcaggttgtggtttctcgatcaggaccatcaacccctcatgtgaattttctcctggactcccatccagtgtctccagaagtgattgtggagcatacattaaaccaaaatggctacacactggttatcactgggaagaagatcgcgaagatcccattgaatggcttgggttgcagacatttccagtcctgcagtcaatgcctctctgccccaccctttgttcagtgtggctggtgccacgacaaatgtgtgcgatcggaggaatgcctgagcgggacatggactcaacagatctgtctgcctgcaatctacaaggttttcccaaatagtgcaccccttgaaggagggacaaggctgaccatatgtggctgggactttggatttcggaggaataataaatttgatttaaagaaaactagagttctccttggaaatgagagctgcaccttgactttaagtgagagcacgatgaatacattgaaatgcacagttggtcctgccatgaataagcatttcaatatgtccataattatttcaaatggccacgggacaacacagtacagtacattctcctatgtgctcccctccaggatcctgtaataacaagtatttcgccgaaatacggtcctatggctggtggcactttacttactttaactggaaattacctaaacagtgggaattctagacacatttcaattggtggaaaaacatgtactttaaaaagtgtgtcaaacagtattcttgaatgttataccccagcccaaaccatttcaactgagtttgctgttaaattgaaaattgacttagccaaccgagagacaagcatcttcagttaccgtgaagatcccattgtctatgaaattcatccaaccaaatcttttattaggtaagtagaagcttctgat

SEQ ID NO: 143 - protein, 661 aa, Homo Sapiens [sequence omitted]

SEQ ID NO: 144 - DNA, 3256 bp, Homo Sapiens
atgaaggcccccgctgtgcttgcacctggcatcctcgtgctcctgtttaccttggtgcagaggagcaatggggagtgtaaagaggcactagcaaagtccgagatgaatgtgaatatgaagtatcagcttcccaacttcaccgcggaaacacccatccagaatgtcattctacatgagcatcacattttccttggtgccactaactacatttatgttttaaatgaggaagaccttcagaaggttgctgagtacaagactgggcctgtgctggaacacccagattgtttcccatgtcaggactgcagcagcaaagccaatttatcaggaggtgtttggaaagataacatcaacatggctctagttgtcgacacctactatgatgatcaactcattagctgtggcagcgtcaacagagggacctgccagcgacatgtctttccccacaatcatactgctgacatacagtcggaggttcactgcatattctccccacagatagaagagcccagccagtgtcctgactgtgtggtgagcgccctgggagccaaagtcctttcatctgtaaaggaccggttcatcaacttctttgtaggcaataccataaattcttcttatttcccagatcatccattgcattcgatatcagtgagaaggctaaaggaaacgaaagatggttttatgtttttgacggaccagtcctacattgatgttttacctgagttcagagattcttaccccattaagtatgtccatgcctttgaaagcaacaattttatttacttcttgacggtccaaagggaaactctagatgctcagacttttcacacaagaataatcaggttctgttccataaactctggattgcattcctacatggaaatgcctctggagtgtattctcacagaaaagagaaaaaagagatccacaaagaaggaagtgtttaatatacttcaggctgcgtatgtcagcaagcctggggcccagcttgctagacaaataggagccagcctgaatgatgacattcttttcggggtgttcgcacaaagcaagccagattctgccgaaccaatggatcgatctgccatgtgtgcattccctatcaaatatgtcaacgacttcttcaacaagatcgtcaacaaaaacgatgtgagatgtctccagcatttttacggacccaatcatgagcactgctttaatgggacacttctgagaaattcatcaggctgtgaagcgcgccgtgatgaatatcgaacagagtttaccacagctttgcagcgcgttgacttattcatgggtcaattcagcgaagtcctcttaacatctatatccaccttcattaaaggagacctcaccatagctaatcttgggacatcagagggtcgcttcatgcaggttgtggtttctcgatcaggaccatcaacccctcgtgtgaattttctcctggactcccatccagtgtctccagaagtgattgtggagcatacattaaaccaaaatggctacacactggttatcactgggaagaagatcacgaagatcccattgaatggtttgggctgcagacatttccagtcctgcagtcaatgcctctctgccccaccctttgttcagtgtggctggtgctacgacaaatgtgtgcgatcggaggaatgcctgagcgggacatggactcaacagatctgtctgcctgcaatctacaaggttttcccaaatagtgcaccccttgaaggagggacaaggctgaccatatgtggctgggactttggatttcggaggaataataaatttgatttaaagaaaactagagttctccttggaaatgagagctgcaccttgactttaagtgagagcacgatgaatacatcgaaatgcacagttggtcctgccatgaataagcatttcaatatgtccataattatttcaaatggccacgggacaacacaatacagtacattctcctatgtggatcctgtaataacaagtatttcgccgaaatacggtcctatggctggtggcactttacttactttaactggaaattacctaaacagtgggaattctagacacatttcaattggtgggaaaacatgtactttaaaaagtgtgtcaaacagtattcttgaatgttataccccagcccaaaccatttcaactgagtttgctgttaaattgaaaattgacttagccaaccgagagacaagcatcttcagttaccgtgaagatcccattgtctatgtaattcatccaaccaaatcttttattaggtaagtagaagcttctgatgggtataagaaaacaatgaatacaaggatgattttgctgtagaatagtcaagaggaattgcagttttatctctggctttgatgctgttatgttgcttttgaaggcttctttccaattcaggagagaaaactatattcaggttctgagtgtagtttgacttatcaatgctagttcattccaagaagtatcttatcctgttctattacatttaaacagagtatagcaaaatagtttaatgtggcattgtagtatacatgcacttacattatgtacatatcaattctatactaaccttagtgcccagaagtggaattaccttttttcttccattctctagatatgtttttgtcctgcctgctttacacacagcttttctttatgccagactctctttgaattgatatctcattggacccagttcaatctgccttgttcccgttaattctatcagtctagcaacaatagttaagttcggttttctttgtatttttttcagaggtgaaatatttattttgtgtaattcggtgaataaaatacaaatgcatttcttaagcttatgaaatatgcattttaaaaatattttcaagttaaataagttgtttccaaagaacagttacccatgaacttccatttgatgttgactgtgcctctgacctgtaatcagtgcaggtgattaaattgaatccctctcttacagtacttggtggaaagaacctctcaacattgtcagttttctattttgctttgccagtggtgggagcacaataacaggtgttgggaaaaacctgaattcagttagtgtcccgagaatggtcataaatgtgcatgaagcaggaaggaactttacagtggtaagtcctttgagcaatggttctactcagagctctgcatctttgcctctaaccatgtggctttcatggtacctgagacatctcagtttcgcctttaaggtttgctagttaatttccttgca

SEQ ID NO: 145 - protein, 755 aa, Homo Sapiens [sequence omitted]

SEQ ID NO: 146 - DNA, 2481 bp, Homo Sapiens
atgaaggcccccgctgtgcttgcacctggcatcctcgtgctcctgtttaccttggtgcagaggagcaatggggagtgtaaagaggcactagcaaagtccgagatgaatgtgaatacgaagtatcagcttcccaacttcaccgcggaaacacccatccagaatgtcattctacatgagcatcacattttccttggtgccactaactacatttatgttttaaatgaggaagaccttcagaaggttgctgagtacaagactgggcctgtgctggaacacccagattgtttcccatgtcaggactgcagcagcaaagccaatttatcaggaggtgtttggaaagataacatcaacatggctctagttgtcgacacctactatgatgatcaactcattagctgtggcagcgtcaacagagggacctgccagcgacatgtctttccccacaatcatactgctgacatacagtcggaggttcactgcatattctccccacagatagaagagcccagccagtgtcctgactgtgtggtgagcgccctgggagccaaagtcctttcatctgtaaaggaccggttcatcaacttctttgtaggcaataccataaattcttcttatttcccagatcatccattgcattcgatatcagtgagaaggctaaaggaaacgaaagatggttttatgtttttgacggaccagtcctacattgatgttttacctgagttcagagattcttaccccattaagtatgtccatgcctttgaaagcaacaattttatttacttcttgacggtccaaagggaaactctagatgctcagacttttcacacaagaataatcaggttctgttccataaactctggattgcattcctacatggaaatgcctctggagtgtattctcacagaaaagagaaaaaagagatccacaaagaaggaagtgtttaatatacttcaggctgcgtatgtcagcaagcctggggcccagcttgctagacaaataggagccagcctgaatgatgacattcttttcggggtgttcgcacaaagcaagccagattctgccgaaccaatggatcgatctgccatgtgtgcattccctatcaaatatgtcaacgacttcttcaacaagatcgtcaacaaaaacaatgtgagatgtctccagcatttttacggacccaatcatgagcactgctttaataggacacttctgagaaattcatcaggctgtgaagcgcgccgtgatgaatatcgaacagagtttaccacagctttgcagcgcgttgacttattcatgggtcaattcagcgaagtcctcttaacatctatatccaccttcattaaaggagacctcaccatagctaatcttgggacatcagagggtcgcttcatgcaggttgtggtttctcgatcaggaccatcaacccctcatgtgaattttctcctggactcccatccagtgtctccagaagtgattgtggagcatacattaaaccaaaatggctacacactggttatcactgggaagaagatcacgaagatcccattgaatggcttgggctgcagacatttccagtcctgcagtcaatgcctctctgccccaccctttgttcagtgtggctggtgccacgacaaatgtgtgcgatcggaggaatgcctgagcgggacatggactcaacagatctgtctgcctgcaatctacaaggttttcccaaatagtgcaccccttgaaggagggacaaggctgaccatatgtggctgggactttggatttcggaggaataataaatttgatttaaagaaaactagagttctccttggaaatgagagctgcaccttgactttaagtgagagcacgatgaatacattgaaatgcacagttggtcctgccatgaataagcatttcaatatgtccataattatttcaaatggccacgggacaacacaatacagtacattctcctatgtggatcctgtaataacaagtatttcgccgaaatacggtcctatggctggtggcactttacttactttaactggaaattacctaaacagtgggaattctagacacatttcaattggtggaaaaacatgtactttaaaaagtgtgtcaaacagtattcttgaatgttataccccagcccaaaccatttcaactgagtttgctgttaaattgaaaattgacttaaccaaccgagagacaagcatcttcagttaccgtgaagatcccattgtctatgaaattcatccaaccaaatcttttattagtggtgggagcacaataacaggtgttgggaaaaacctgaattcagttagtgtcccgagaatggtcataaatgtgcatgaagcaggaaggaactttacagtggtaagtcctttgagcaatggttctactcagagctctgcatctttgcctctaaccatgtggctttcatggtacctgagacatctcagtttcgcctttaaggtttgctagttaatttcc

SEQ ID NO: 147 - protein, 823 aa, Homo Sapiens [sequence omitted]

SEQ ID NO: 148 - DNA, 2667 bp, Homo Sapiens
atgaaggcccccgctgtgcttgcacctggcatcctcgtgctcctgtttaccttggtgcagaggagcaatggggagtgtaaagaggcactagcaaagtccgagatgaatgtgaatatgaagtatcagcttcccaacttcaccgcggaaacacccatccagaatgtcattctacatgagcatcacattttccttggtgccactaactacatttatgttttaaatgaggaagaccttcagaaggttgctgagtacaagactgggcctgtgctggaacacccagattgtttcccatgtcaggactgcagcagcaaagccaatttatcaggaggtgtttggaaagataacatcaacatggctctagttgtcgacacctactatgatgatcaactcattagctgtggcagcgtcaacagagggacctgccagcgacatgtctttccccgcaatcatactgctgacatacagtcggaggttcactgcatattctccccacagatagaagagcccagccagtgtcctgactgtgtggtgagcgccctgggagccaaagtcctttcatctgtaaaggaccggttcaccaacttctttgtaggcaataccataaattcttcttatttcccagatcatccattgcattcgatatcagtgagaaggctaaaggaaacgaaagatggttttatgtttttgacggaccagtcctacattgatgttttacctgagttcagagattcttaccccattaagtatgtccatgcctttgaaagcaacaattttatttacttcttgacggtccaaagggaaactctagatgctcagacttttcacacaagaataatcaggttctgttccataaactctggattgcattcctacatggaaatgcctctggagtgtattctcacagaaaagagaaaaaagagatccacaaagaaggaagtgtttaatatacttcaggctgcgtatgtcagcaagcctggggcccagcttgctagacaaataggagccagcccgaatgatgacattcttttcggagtgttcgcacaaagcaagccagattctgccgaaccaatggatcgatctgccatgtgtgcattccctatcaaatatgtcaacgacttcttcaacaagatcgtcaacaaaaacaatgtgagatgtctccagcatttttacggacccaatcatgagcactgctttaataggacacttctgagaaattcatcaggctgtgaagcgcgccgtgatgaatatcgaacagagttcaccacagctttgcagcgcgttgacttattcatgggtcaattcagcgaagtcctcttaacatctatatccaccttcattaaaggagacctcaccatagctaatcttgggacatcagagggtcgcttcatgcaggttgtggtttctcgatcaggaccatcaacccctcatgtgaattttctcctggactcccatccagtgtctccagaagtgattgtggagcatacattaaaccaaaatggctacacactggttatcactgggaagaagatcacgaagatcccattgaatggcttgggctgcagacatttccagtcctgcagtcaatgcctctctgccccaccctttgttcagtgtggctggtgccacgacaaatgtgtgcgatcggaggaatgcctgagcgggacatggactcaacagatctgtctgcctgcaatctacaaggttttcccaaatagtgcaccccttgaaggagggacaaggctgaccatatgtggctgggactttggatttcggaggaataataaatttgatttaaagaaaactagagttctccttggaaatgagagctgcaccttgactttaagtgagagcacgatgaatacattgaaatgcacagttggtcctgccatgaataagcatttcaatatgtccataattatttcaaatggccacgggacaacacaatacagtacattctcctatgtggatcctgtaataacaagtatttcgccgaaatacggtcctatggctggtggcactttacttactttaactggaaattacctaaacagtgggaattctagacacatttcaattggtggaaaaacatgtactttaaaaagtgtgtcaaacagtattcttgaatgttataccccagcccaaaccatttcaactgagtttgctgttaaattgaaaattgacttagccaaccgagagacaagcatcttcagttaccgtgaagatcccattgtctatgaaattcatccaaccaaatcttttattagtggtgggagcacaataacaggtgttgggaaaaacctgaattcagttagtgtcccgagaatggtcataaatgtgcatgaagcgggaaggaactttacagtggcatgtcaacatcgctctaattcagagataatctgttgtaccactccttccctgcaacagctgaatctgcaactccccctgaaaaccaaagcctttttcatgttagatgggatcctttccaaatactttgatctcatttatgtacataatcctgtgtttaagccttttgaaaagccagtgatgatctcaatgggcaatgaaaatgtactggaaattaaggtaagaaatgctttaaacactgtcttaaatcatcagctcaaacttaattgacttcatagctatgtgaatacaattgttgtactt

SEQ ID NO: 149 - protein, 877 aa, Homo Sapiens [sequence omitted]

SEQ ID NO: 150 - DNA, 2542 bp, Homo Sapiens
atgaaggcccccgctgtgcttgcacctggcatcctcgtgctcctgtttaccttggtgcagaggagcaatggggagtgtaaagaggcactagcaaagtccgagatgaatgtgaatatgaagtatcagcttcccaacttcaccgcggaaacacccatccagaatgtcattctacatgagcatcacattttccttggtgccactaactacatttatgttttaaatgaggaagaccttcagaaggttgctgagtacaagactgggcctgtgctggaacacccagattgtttcccatgtcaggactgcagcagcaaagccaatttatcaggaggtgtttggaaagataacatcaacatggctctagttgtcgacacctactatgatgatcaactcattagctgtggcagcgtcaacagagggacctgccagcgacatgtctttccccacaatcatactgctgacatacagtcggaggttcactgcatattctccccacagatagaagagcccagccagtgtcctgactgtgtggtgagcgccctgggagccaaagtcctttcatctgtaaaggaccggttcatcaacttctttgtaggcaataccataaattcttcttatttcccagatcatccattgcattcgatatcagtgagaaggctaaaggaaacgaaagatggttttatgtttttgacggaccagtcctacattgatgctttacctgagttcagagattcttaccccattaagtatgtccatgcctttgaaagcaacaattttatttacttcttgacggtccaaagggaaactctagatgctcagacttttcacacaagaataatcaggttctgttccataaactctggattgcattcctacatggaaatgcctctggagtgtattctcacagaaaagagaaaaaagagatccacaaagaaggaagtgtttaatatacttcaggctgcgtatgtcagcaagcctggggcccagcttgctagacaaataggagccagcctgaatgatgacattcttttcggggtgttcgcacaaagcaagccagattctgccgaaccaatggatcgatctgccatgtgtgcattccctatcaaatatgtcaacgacttcttcaacaagatcgtcaacaaaaacaatgtgagatgtctccagcatttttacggacccaatcatgagcactgctttaataggacacttctgagaaattcatcaggctgtgaagcgcgccgtgatgaatatcgaacagagtttaccacagctttgcagcgcgttgacttattcatgggtcaattcagcgaagtcctcttaacatctatatccaccttcattaaaggagacctcaccatagctaatcttgggacatcagagggtcgcttcatgcaggttgtggtttctcgatcaggaccatcaacccctcatgtgaattttctcctggactcccatccagtgtctccagaagtgattgtggagcatacattaaaccaaaatggctacacactggttatcactgggaggaagatcacgaagatcccattgaatggcttgggctgcagacatttccagtcctgcagtcaatgcctctctgccccaccctttgttcagtgtggctggtgccacgacaaatgtgtgcgatcggaggaatgcctgagcgggacatggactcagcagatctgtctgcctgcaatctacaaggttttcccaaatagtgcaccccttgaaggagggacaaggctgaccatatgtggctgggactttggatttcggaggaataataaatttgatttaaagaaaactagagttctccttggaaatgagagctgcaccttgactttaagtgagagcacgatgaatacattgaaatgcacagttggtcctgccatgaataagcatttcaatatgtccataattatttcaaatggccacgggacaacacaatacagtacattctcctatgtggatcctgtaataacaagtatttcgccgaaatacggtcctatggctggtggcactttacttactttaactggaaattacctaaacagtgggaattctagacacatttcaattggtggaaaaacgtgtactttaaaaagtgtgtcaaacagtattcttgaatgttataccccagcccaaaccatttcaactgagtctgctgttaaattgaaaattgacttagccaaccgagagacaagcatcttcagttaccgtgaagatcccattgtctatgaaattcatccaaccaaatcttttattaggcatgtcaacatcgctctaattcagagataatctgttgtaccactccttccctgcaacagctgaatctgcaactccccctgaaaaccaaagcctttttcatgttagatgggatcctttccaaatactttgatctcatttatgtacataatcctgtgtctaagccttttggaaagccagtgatgatctcaatgggcaatgaaaatgtactggaaattaagataagaaatgctttaaacactgtcttaaatcatcagctcaaacttaattgacttcatag

SEQ ID NO: 151 - protein, 764 aa, Homo Sapiens [sequence omitted]

SEQ ID NO: 152 - DNA, 3113 bp, Homo Sapiens
ggtcccagctcgcctcgatggagctcctcccgccgctgcctcagtccttcctgttgctgctgctgttgcctgccaagcccgcggcgggcgaggactggcagtgcccgcgcaccccctacgcggcctctcgcgactttgacgtgaagtacgtggtgcccagcttctccgccggaggcctggtacaggccatggtgacctacgagggcgacagaaatgagagtgctgtgtttgtagccatacgcaatcgcctgcatgtgcttgggcctgacctgaagtctgtccagagcctggccacgggccctgctggagaccctggctgccagacgtgtgcagcctgtggcccaggaccccacggccctcccggtgacacagacacaaaggtgctggtgctggatcccgcgctgcctgcgctggtcagttgtggctccagcctgcagggccgctgcttcctgcatgacctagagccccaagggacagccgtgcatctggcagcgccagcctgcctcttctcagcccaccataaccggcccgatgactgccccgactgtgtggccagcccattgggcacccgtgtaactgtggttgagcaaggccaggcctcctatttctacgtggcatcctcactggacgcagccgtggctgccagcttcagcccacgctcagtgtctatcaggcgtctcaaggctgacgcctcgggattcgcaccgggctttgtggcgttgtcagtgctgcccaagcatcttgtctcctacagtattgaatacgtgcacagcttccacacgggagccttcgtatacttcctgactgtacagccggccagcgtgacagatgatcctagtgccctgcacacacgcctggcacggcttagcgccactgagccagagttgggtgactatcgggagctggtcctcgactgcagatttgctccaaaacgcaggcgccggggggccccagaaggcggacagccctaccctgtgctgcgggtggcccactccgctccagtgggtgcccaacttgccactgagctgagcatcgccgagggccaggaagtactatttggggtctttgtgactggcaaggatggtggtcctggcgtgggccccaactctgtcgtctgtgccttccccattgacctgctggacacactaattgatgagggtgtggagcgctgttgtgaatccccagtccatccaggcctccggcgaggcctcgacttcttccagtcgcccagtttttgccccaacccggttttccaggtacctatccaaggccctggctgccgccacttcctgacctgtgggcgttgcctaagggcatggcatttcatgggctgtggctggtgtgggaacatgtgcggccagcagaaggagtgtcctggctcctggcaacaggaccactgcccacctaagcttactgagttccacccccacagtggacctctaaggggcagtacaaggctgaccctgtgtggctccaacttctaccttcacccttctggtctggtgcctgagggaacccatcaggtcactgtgggccaaagtccctgccggccactgcccaaggacagctcaaaactcaggtacaatctggtccctcccctccctttccctgaagggggaaaccaagcagccccttccccatgagaccctgttctctgcttatcagaggcaaggggggatgggggaagctgcagtggttctgactgctttttgagagtcaaaaaggtctctgtccctttttgagctttcatgtgcccttcctgtctgttcactcatggaccagccaaggttaatctctgccccaccagaaccttccttccatggagggaggcatgggtggagaaatgccattctctggctcagaggagccctgtggcttgtggcaggcatgcatctaggcctgtgtaattcctggctgacctcaggggttcccctggtgccccagaccagtgccccggaaagactttgtagaggagtttgagtgtgaactggagcccttgggcacccaggcagtggggcctaccaacgtcagcctcaccgtgactaacatgccaccgggcaagcacttccgggtagacggcacctccgtgctgagaggcttctctttcatggagccagtgctgatagcagtgcaacccctctttggcccacgggcaggaggcacctgtctcactcttgaaggccagagtctgtctgtaggcaccagccgggctgtgctggtcaatgggactgagtgtctgctagcacgggtcagtgaggggcagcttttatgtgccacaccccctggggccacggtggccagtgtcccccttagcctgcaggtggggggtgcccaggtacctggttcctggaccttccagtacagagaagaccctgtcgtgctaagcatcagccccaactgtggctacatcaactcccacatcaccatctgtggccagcatctaacttcagcatggcacttagtgctgtcattccatgacgggcttagggcagtggaaagcaggtgtgagaggcagcttccagagcagcagctgtgccgccttcctgaatatgtggtccgagacccccagggatgggtggcagggaatctgagtgcccgaggggatggagctgctggctttacactgcctggctttcgcttcctacccccaccccatccacccagtgccaacctagttccactgaagcctgaggagcatgccattaagtttgaggtaagtgtaagggataggggcagggacagttggggatctgaaagtaggggccagcctactggctggtcctcatgaccctctctgcagtatattgggctgggcgctgtggctgactgtgtgggtatcaacgtgaccgtgggtggtgagagctgccagcacgagttccggggggacatggttgtctgccccctgcccccatccctgcagcttggccaggatggtgccccattgcaggtctgcgtagatggtgaatgtcatatcctgggtagagtggtgcggccagggccagatggggtcccacagagcacgctccttggtatcctgctgcctttgctgctgcttgtggctgcactggcgactgcactggtcttcagctactggtggcggaggaagcagctag

SEQ ID NO: 153 - protein, 541 aa, Homo Sapiens
MELLPPLPQSFLLLLLLPAKPAAGEDWQCPRTPYAASRDFDVKYVVPSFSAGGLVQAMVTYEGDRNESAVFVAIRNRLHVLGPDLKSVQSLATGPAGDPGCQTCAACGPGPHGPPGDTDTKVLVLDPALPALVSCGSSLQGRCFLHDLEPQGTAVHLAAPACLFSAHHNRPDDCPDCVASPLGTRVTVVEQGQASYFYVASSLDAAVAASFSPRSVSIRRLKADASGFAPGFVALSVLPKHLVSYSIEYVHSFHTGAFVYFLTVQPASVTDDPSALHTRLARLSATEPELGDYRELVLDCRFAPKRRRRGAPEGGQPYPVLRVAHSAPVGAQLATELSIAEGQEVLFGVFVTGKDGGPGVGPNSVVCAFPIDLLDTLIDEGVERCCESPVHPGLRRGLDFFQSPSFCPNPVFQVPIQGPGCRHFLTCGRCLRAWHFMGCGWCGNMCGQQKECPGSWQQDHCPPKLTEFHPHSGPLRGSTRLTLCGSNFYLHPSGLVPEGTHQVTVGQSPCRPLPKDSSKLRYNLVPPLPFPEGGNQAAPSP

SEQ ID NO: 154 - DNA, 3069 bp, Homo Sapiens
ggtcccagctcgcctcgatggagctcctcccgccgctgcctcagtccttcctgttgctgctgctgttgcctgccaagcccgcggcgggcgaggactggcagtgcccgcgcaccccctacgcggcctctcgcgactttgacgtgaagtacgtggtgcccagcttctccgccggaggcctggtacaggccatggtgacctacgagggcgacagaaatgagagtgctgtgtttgtagccatacgcaatcgcctgcatgtgcttgggcctgacctgaagtctgtccagagcctggccacgggccctgctggagaccctggctgccagacgtgtgcagcctgtggcccaggaccccacggccctcccggtgacacagacacaaaggtgctggtgctggatcccgcgctgcctgcgctggtcagttgtggctccagcctgcagggccgctgcttcctgcatgacctagagccccaagggacagccgtgcatctggcagcgccagcctgcctcttctcagcccaccataaccggcccgatgactgccccgactgtgtggccagcccattgggcacccgtgtaactgtggttgagcaaggccaggcctcctatttctacgtggcatcctcactggacgcagccgtggctgccagcttcagcccacgctcagtgtctatcaggcgtctcaaggctgacgcctcgggattcgcaccgggctttgtggcgttgtcagtgctgcccaagcatcttgtctcctacagtattgaatacgtgcacagcttccacacgggagccttcgtatacttcctgactgtacagccggccagcgtgacagatgatcctagtgccctgcacacacgcctggcacggcttagcgccactgagccagagttgggtgactatcgggagctggtcctcgactgcagatttgctccaaaacgcaggcgccggggggccccagaaggcggacagccctaccctgtgctgcgggtggcccactccgctccagtgggtgcccaacttgccactgagctgagcatcgccgagggccaggaagtactatttggggtctttgtgactggcaaggatggtggtcctggcgtgggccccaactctgtcgtctgtgccttccccattgacctgctggacacactaattgatgagggtgtggagcgctgttgtgaatccccagtccatccaggcctccggcgaggcctcgacttcttccagtcgcccagtttttgccccaacccgcctggcctggaagccctcagccccaacaccagctgccgccacttccctctgctggtcagtagcagcttctcacgtgtggacctattcaatgggctgttgggaccagtacaggtcactgcattgtatgtgacacgccttgacaacgtcacagtggcacacatgggcacaatggatgggcgtatcctgcaggtggagctggtcaggtcactaaactacttgctgtatgtgtccaacttctcactgggtgacagtgggcagcccgtgcagcgggatgtcagtcgtcttggggaccacctactctttgcctctggggaccaggttttccaggtacctatccaaggccctggctgccgccacttcctgacctgtgggcgttgcctaagggcatggcatttcatgggctgtggctggtgtgggaacatgtgcggccagcagaaggagtgtcctggctcctggcaacaggaccactgcccacctaagcttactgagttccacccccacagtggacctctaaggggcagtacaaggctgaccctgtgtggctccaacttctaccttcacccttctggtctggtgcctgagggaacccatcaggtcactgtgggccaaagtccctgccggccactgcccaaggacagctcaaaactcagaccagtgccccggaaagactttgtagaggagtttgagtgtgaactggagcccttgggcacccaggcagtggggcctaccaacgtcagcctcaccgtgactaacatgccaccgggcaagcacttccgggtagacggcacctccgtgctgagaggcttctctttcatggagccagtgctgatagcagtgcaacccctctttggcccacgggcaggaggcacctgtctcactcttgaaggccagagtctgtctgtaggcaccagccgggctgtgctggtcaatgggactgagtgtctgctagcacgggtcagtgaggggcagcttttatgtgccacaccccctggggccacggtggccagtgtcccccttagcctgcaggtggggggtgcccaggtacctggttcctggaccttccagtacagagaagaccctgtcgtgctaagcatcagccccaactgtggctacatcaactcccacatcaccatctgtggccagcatctaacttcagcatggcacttagtgctgtcattccatgacgggcttagggcagtggaaagcaggcagtgtgagaggcagcttccagagcagcagctgtgccgccttcctgaatatgtggtccgagacccccagggatgggtggcagggaatctgagtgcccgaggggatggagctgctggctttacactgcctggctttcgcttcctacccccaccccatccacccagtgccaacctagttccactgaagcctgaggagcatgccattaagtttgaggtaagtgtaagggataggggcagggacagttggggatctgaaagtaggggccagcctactggctggtcctcatgaccctctctgcagtatattgggctgggcgctgtggctgactgtgtgggtatcaacgtgaccgtgggtggtgagagctgccagcacgagttccggggggacatggttgtctgccccctgcccccatccctgcagcttggccaggatggtgccccattgcaggtctgcgtagatggtgaatgtcatatcctgggtagagtggtgcggccagggccagatggggtcccacagagcacgctccttggtatcctgctgcctttgctgctgcttgtggctgcactggcgactgcactggtcttcagctactggtggcggaggaagcagctag

SEQ ID NO: 155 - protein, 908 aa, Homo Sapiens
MELLPPLPQSFLLLLLLPAKPAAGEDWQCPRTPYAASRDFDVKYVVPSFSAGGLVQAMVTYEGDRNESAVFVAIRNRLHVLGPDLKSVQSLATGPAGDPGCQTCAACGPGPHGPPGDTDTKVLVLDPALPALVSCGSSLQGRCFLHDLEPQGTAVHLAAPACLFSAHHNRPDDCPDCVASPLGTRVTVVEQGQASYFYVASSLDAAVAASFSPRSVSIRRLKADASGFAPGFVALSVLPKHLVSYSIEYVHSFHTGAFVYFLTVQPASVTDDPSALHTRLARLSATEPELGDYRELVLDCRFAPKRRRRGAPEGGQPYPVLRVAHSAPVGAQLATELSIAEGQEVLFGVFVTGKDGGPGVGPNSVVCAFPIDLLDTLIDEGVERCCESPVHPGLRRGLDFFQSPSFCPNPPGLEALSPNTSCRHFPLLVSSSFSRVDLFNGLLGPVQVTALYVTRLDNVTVAHMGTMDGRILQVELVRSLNYLLYVSNFSLGDSGQPVQRDVSRLGDHLLFASGDQVFQVPIQGPGCRHFLTCGRCLRAWHFMGCGWCGNMCGQQKECPGSWQQDHCPPKLTEFHPHSGPLRGSTRLTLCGSNFYLHPSGLVPEGTHQVTVGQSPCRPLPKDSSKLRPVPRKDFVEEFECELEPLGTQAVGPTNVSLTVTNMPPGKHFRVDGTSVLRGFSFMEPVLIAVQPLFGPRAGGTCLTLEGQSLSVGTSRAVLVNGTECLLARVSEGQLLCATPPGATVASVPLSLQVGGAQVPGSWTFQYREDPVVLSISPNCGYINSHITICGQHLTSAWHLVLSFHDGLRAVESRQCERQLPEQQLCRLPEYVVRDPQGWVAGNLSARGDGAAGFTLPGFRFLPPPHPPSANLVPLKPEEHAIKFEVSVRDRGRDSWGSESRGQPTGWSS

SEQ ID NO: 156 - DNA, 3500 bp, Homo Sapiens
ggtcccagctcgcctcgatggagctcctcccgccgctgcctcagtccttcctgttgctgctgctgttgcctgccaagcccgcggcgggcgaggactggcagtgcccgcgcaccccctacgcggcctctcgcgactttgacgtgaagtacgtggtgcccagcttctccgccggaggcctggtacaggccatggtgacctacgagggcgacagaaatgagagtgctgtgtttgtagccatacgcaatcgcctgcatgtgcttgggcctgacctgaagtctgtccagagcctggccacgggccctgctggagaccctggctgccagacgtgtgcagcctgtggcccaggaccccacggccctcccggtgacacagacacaaaggtgctggtgctggatcccgcgctgcctgcgctggtcagttgtggctccagcctgcagggccgctgcttcctgcatgacctagagccccaagggacagccgtgcatctggcagcgccagcctgcctcttctcagcccaccataaccggcccgatgactgccccgactgtgtggccagcccattgggcacccgtgtaactgtggttgagcaaggccaggcctcctatttctacgtggcatcctcactggacgcagccgtggctgccagcttcagcccacgctcagtgtctatcaggcgtctcaaggctgacgcctcgggattcgcaccgggctttgtggcgttgtcagtgctgcccaagcatcttgtctcctacagtattgaatacgtgcacagcttccacacgggagccttcgtatacttcctgactgtacagccggccagcgtgacagatgatcctagtgccctgcacacacgcctggcacggcttagcgccactgagccagagttgggtgactatcgggagctggtcctcgactgcagatttgctccaaaacgcaggcgccggggggccccagaaggcggacagccctaccctgtgctgcgggtggcccactccgctccagtgggtgcccaacttgccactgagctgagcatcgccgagggccaggaagtactatttggggtctttgtgactggcaaggatggtggtcctggcgtgggccccaactctgtcgtctgtgccttccccattgacctgctggacacactaattgatgagggtgtggagcgctgttgtgaatccccagtccatccaggcctccggcgaggcctcgacttcttccagtcgcccagtttttgccccaacccgcctggcctggaagccctcagccccaacaccagctgccgccacttccctctgctggtcagtagcagcttctcacgtgtggacctattcaatgggctgttgggaccagtacaggtcactgcattgtatgtgacacgccttgacaacgtcacagtggcacacatgggcacaatggatgggcgtatcctgcaggtggagctggtcaggtcactaaactacttgctgtatgtgtccaacttctcactgggtgacagtgggcagcccgtgcagcgggatgtcagtcgtcttggggaccacctactctttgcctctggggaccaggttttccaggtacctatccaaggccctggctgccgccacttcctgacctgtgggcgttgcctaagggcatggcatttcatgggctgtggctggtgtgggaacatgtgcggccagcagaaggagtgtcctggctcctggcaacaggaccactgcccacctaagcttactgagttccacccccacagtggacctctaaggggcagtacaaggctgaccctgtgtggctccaacttctaccttcacccttctggtctggtgcctgagggaacccatcaggtcactgtgggccaaagtccctgccggccactgcccaaggacagctcaaaactcaggtacaatctggtccctcccctccctttccctgaagggggaaaccaagcagccccttccccatgagaccctgttctctgcttatcagaggcaaggggggatgggggaagctgcagtggttctgactgctttttgagagtcaaaaaggtctctgtccctttttgagctttcatgtgcccttcctgtctgttcactcatggaccagccaaggttaatctctgccccaccagaaccttccttccatggagggaggcatgggtggagaaatgccattctctggctcagaggagccctgtggcttgtggcaggcatgcatctaggcctgtgtaattcctggctgacctcaggggttcccctggtgccccagaccagtgccccggaaagactttgtagaggagtttgagtgtgaactggagcccttgggcacccaggcagtggggcctaccaacgtcagcctcaccgtgactaacatgccaccgggcaagcacttccgggtagacggcacctccgtgctgagaggcttctctttcatggagccagtgctgatagcagtgcaacccctctttggcccacgggcaggaggcacctgtctcactcttgaaggccagagtctgtctgtaggcaccagccgggctgtgctggtcaatgggactgagtgtctgctagcacgggtcagtgaggggcagcttttatgtgccacaccccctggggccacggtggccagtgtcccccttagcctgcaggtggggggtgcccaggtacctggttcctggaccttccagtacagagaagaccctgtcgtgctaagcatcagccccaactgtggctacatcaactcccacatcaccatctgtggccagcatctaacttcagcatggcacttagtgctgtcattccatgacgggcttagggcagtggaaagcaggtgtgagaggcagcttccagagcagcagctgtgccgccttcctgaatatgtggtccgagacccccagggatgggtggcagggaatctgagtgcccgaggggatggagctgctggctttacactgcctggctttcgcttcctacccccaccccatccacccagtgccaacctagttccactgaagcctgaggagcatgccattaagtttgaggtaagtgtaagggataggggcagggacagttggggatctgaaagtaggggccagcctactggctggtcctcatgaccctctctgcagtatattgggctgggcgctgtggctgactgtgtgggtatcaacgtgaccgtgggtggtgagagctgccagcacgagttccggggggacatggttgtctgccccctgcccccatccctgcagcttggccaggatggtgccccattgcaggtaggcagcccagctggacctccctgggaaacacgggcagagggcctacaggctgggcctgagttgccacctgcccccaggtctgcgtagatggtgaatgtcatatcctgggtagagtggtgcggccagggccagatggggtcccacagagcacgctccttggtatcctgctgcctttgctgctgcttgtggctgcactggcgactgcactggtcttcagctactggtggcggag

SEQ ID NO: 157 - protein, 647 aa, Homo Sapiens
MELLPPLPQSFLLLLLLPAKPAAGEDWQCPRTPYAASRDFDVKYVVPSFSAGGLVQAMVTYEGDRNESAVFVAIRNRLHVLGPDLKSVQSLATGPAGDPGCQTCAACGPGPHGPPGDTDTKVLVLDPALPALVSCGSSLQGRCFLHDLEPQGTAVHLAAPACLFSAHHNRPDDCPDCVASPLGTRVTVVEQGQASYFYVASSLDAAVAASFSPRSVSIRRLKADASGFAPGFVALSVLPKHLVSYSIEYVHSFHTGAFVYFLTVQPASVTDDPSALHTRLARLSATEPELGDYRELVLDCRFAPKRRRRGAPEGGQPYPVLRVAHSAPVGAQLATELSIAEGQEVLFGVFVTGKDGGPGVGPNSVVCAFPIDLLDTLIDEGVERCCESPVHPGLRRGLDFFQSPSFCPNPPGLEALSPNTSCRHFPLLVSSSFSRVDLFNGLLGPVQVTALYVTRLDNVTVAHMGTMDGRILQVELVRSLNYLLYVSNFSLGDSGQPVQRDVSRLGDHLLFASGDQVFQVPIQGPGCRHFLTCGRCLRAWHFMGCGWCGNMCGQQKECPGSWQQDHCPPKLTEFHPHSGPLRGSTRLTLCGSNFYLHPSGLVPEGTHQVTVGQSPCRPLPKDSSKLRYNLVPPLPFPEGGNQAAPSP

SEQ ID NO: 158 - DNA, 2273 bp, Homo Sapiens
ctctggagtatggtctggcgggtgccccctttcttgctccccatcctcttcttggcttctcatgtgggcgcggcggtggacctgacgctgctggccaacctgcggctcacggacccccagcgcttcttcctgacttgcgtgtctggggaggccggggcggggaggggctcggacgcctggggcccgcccctgctgctggagaaggacgaccgtatcgtgcgcaccccgcccgggccacccctgcgcctggcgcgcaacggttcgcaccaggtcacgcttcgcggcttctccaagccctcggacctcgtgggcgtcttctcctgcgtgggcggtgctggggcgcggcgcacgcgcgtcatctacgtgcacaacagccctggagcccacctgcttccagacaaggtcacacacactgtgaacaaaggtgacaccgctgtactttctgcacgtgtgcacaaggagaagcagacagacgtgatctggaagagcaacggatcctacttctacaccctggactggcatgaagcccaggatgggcggttcctgctgcagctcccaaatgtgcagccaccatcgagcggcatctacagtgccacttacctggaagccagccccctgggcagcgccttctttcggctcatcgtgcggggttgtggggctgggcgctgggggccaggctgtaccaaggagtgcccaggttgcctacatggaggtgtctgccacgaccatgacggcgaatgtgtatgcccccctggcttcactggcacccgctgtgaacaggcctgcagagagggccgttttgggcagagctgccaggagcagtgcccaggcatatcaggctgccggggcctcaccttctgcctcccagacccctatggctgctcttgtggatctggctggagaggaagccagtgccaagaagcttgtgcccctggtcattttggggctgattgccgactccagtgccagtgtcagaatggtggcacttgtgaccggttcagtggttgtgtctgcccctctgggtggcatggagtgcactgtgagaagtcagaccggatcccccagatcctcaacatggcctcagaactggagttcaacttagagacgatgccccggatcaactgtgcagctgcagggaaccccttccccgtgcggggcagcatagagctacgcaagccagacggcactgtgctcctgtccaccaaggccattgtggagccagagaagaccacagctgagttcgaggtgccccgcttggttcttgcggacagtgggttctgggagtgccgtgtgtccacatctggcggccaagacagccggcgcttcaaggtcaatgtgaaagtgccccccgtgcccctggctgcacctcggctcctgaccaagcagagccgccagcttgtggtctccccgctggtctcgttctctggggatggacccatctccactgtccgcctgcactaccggccccaggacagtaccatggactggtcgaccattgtggtggaccccagtgagaacgtgacgttaatgaacctgaggccaaagacaggatacagtgttcgtgtgcagctgagccggccaggggaaggaggagagggggcctgggggcctcccaccctcatgaccacagactgtcctgagcctttgttgcagccgtggttggagggctggcatgtggaaggcactgaccggctgcgagtgagctggtccttgcccttggtgcccgggccactggtgggcgacggtttcctgctgcgcctgtgggacgggacacgggggcaggagcggcgggagaacgtctcatccccccaggcccgcactgccctcctgacgggactcacgcctggcacccactaccagctggatgtgcagctctaccactgcaccctcctgggcccggcctcgccccctgcacacgtgcttctgccccccagtgggcctccagccccccgacacctccacgcccaggccctctcagactccgagatccagctgacatggaagcacccggaggctctgcctgggccaatatccaagtacgttgtggaggtgcaggtggctgggggtgcaggagacccactgtggatagacgtggacaggcctgaggagacaagcaccatcatccgtggcctcaacgccagcacgcgctacctcttccgcatgcgggccagcattcaggggctcggggactggagcaacacagtagaagagtccaccctgggcaacggtgagagggcagggcccacaggaccccccgggctctgagcggggag

SEQ ID NO: 159 - protein, 751 aa, Homo Sapiens
MVWRVPPFLLPILFLASHVGAAVDLTLLANLRLTDPQRFFLTCVSGEAGAGRGSDAWGPPLLLEKDDRIVRTPPGPPLRLARNGSHQVTLRGFSKPSDLVGVFSCVGGAGARRTRVIYVHNSPGAHLLPDKVTHTVNKGDTAVLSARVHKEKQTDVIWKSNGSYFYTLDWHEAQDGRFLLQLPNVQPPSSGIYSATYLEASPLGSAFFRLIVRGCGAGRWGPGCTKECPGCLHGGVCHDHDGECVCPPGFTGTRCEQACREGRFGQSCQEQCPGISGCRGLTFCLPDPYGCSCGSGWRGSQCQEACAPGHFGADCRLQCQCQNGGTCDRFSGCVCPSGWHGVHCEKSDRIPQILNMASELEFNLETMPRINCAAAGNPFPVRGSIELRKPDGTVLLSTKAIVEPEKTTAEFEVPRLVLADSGFWECRVSTSGGQDSRRFKVNVKVPPVPLAAPRLLTKQSRQLVVSPLVSFSGDGPISTVRLHYRPQDSTMDWSTIVVDPSENVTLMNLRPKTGYSVRVQLSRPGEGGEGAWGPPTLMTTDCPEPLLQPWLEGWHVEGTDRLRVSWSLPLVPGPLVGDGFLLRLWDGTRGQERRENVSSPQARTALLTGLTPGTHYQLDVQLYHCTLLGPASPPAHVLLPPSGPPAPRHLHAQALSDSEIQLTWKHPEALPGPISKYVVEVQVAGGAGDPLWIDVDRPEETSTIIRGLNASTRYLFRMRASIQGLGDWSNTVEESTLGNGERAGPTGPPGL

SEQ ID NO: 160 - DNA, 2432 bp, Homo Sapiens
catttcgcccggctcgaggtgcaggatgcagagcaaggtgctgctggccgtcgccctgtggctctgcgtggagacccgggccgcctctgtgggtttgcctagtgtttctcttgatctgcccaggctcagcatacaaaaagacatacttacaattaaggctaatacaactcttcaaattacttgcaggggacagagggacttggactggctttggcccaataatcagagtggcagtgagcaaagggtggaggtgactgagtgcagcgatggcctcttctgtaagacactcacaattccaaaagtgatcggaaatgacactggagcctacaagtgcttctaccgggaaactgacttggcctcggtcatttatgtctatgttcaagattacagatctccatttattgcttctgttagtgaccaacatggagtcgtgtacattactgagaacaaaaacaaaactgtggtgattccatgtctcgggtccatttcaaatctcaacgtgtcactttgtgcaagatacccagaaaagagatttgttcctgatggtaacagaatttcctgggacagcaagaagggctttactattcccagctacatgatcagctatgctggcatggtcttctgtgaagcaaaaattaatgatgaaagttaccagtctattatgtacatagttgtcgttgtagggtataggatttatgatgtggttctgagtccgtctcatggaattgaactatctgttggagaaaagcttgtcttaaattgtacagcaagaactgaactaaatgtggggattgacttcaactgggaatacccttcttcgaagcatcagcataagaaacttgtaaaccgagacctaaaaacccagtctgggagtgagatgaagaaatttttgagcaccttaactatagatggtgtaacccggagtgaccaaggattgtacacctgtgcagcatccagtgggctgatgaccaagaagaacagcacatttgtcagggtccatgaaaaaccttttgttgcttttggaagtggcatggaatctctggtggaagccacggtgggggagcgtgtcagaatccctgcgaagtaccttggttacccacccccagaaataaaatggtataaaaatggaataccccttgagtccaatcacacaattaaagcggggcatgtactgacgattatggaagtgagtgaaagagacacaggaaattacactgtcatccttaccaatcccatttcaaaggagaagcagagccatgtggtctctctggttgtgtatgtcccaccccagattggtgagaaatctctaatctctcctgtggattcctaccagtacggcaccactcaaacgctgacatgtacggtctatgccattcctcccccgcatcacatccactggtattggcagttggaggaagagtgcgccaacgagcccagccaagctgtctcagtgacaaacccatacccttgtgaagaatggagaagtgtggaggacttccagggaggaaataaaattgaagttaataaaaatcaatttgctctaattgaaggaaaaaacaaaactgtaagtacccttgttatccaagcggcaaatgtgtcagctttgtacaaatgtgaagcggtcaacaaagtcgggagaggagagagggtgatctccttccacgtgaccaggggtcctgaaattactttgcaacctgacatgcagcccactgagcaggagagcgtgtctttgtggtgcactgcagacagatctacgtttgagaacctcacatggtacaagcttggcccacagcctctgccaatccatgtgggagagttgcccacacctgtttgcaagaacttggatactctttggaaattgaatgccaccatgttctctaatagcacaaatgacattttgatcatggagcttaagaatgcatccttgcaggaccaaggagactatgtctgccttgctcaagacaggaagaccaagaaaagacattgcgtggtcaggcagctcacagtcctagagcgtgtggcacccacgatcacaggaaacctggagaatcagacgacaagtattggggaaagcatcgaagtctcatgcacggcatctgggaatccccctccacagatcatgtggtttaaagataatgagacccttgtagaagactcagagtgaggaaggaggacgaaggcctctacacctgccaggcatgcagtgttcttggctgtgcaaaagtggaggcatttttcataatagaaggtgcccaggaaaagacgaacttggaaatcattattctagtaggcacggcggtgattgccatgttcttctggctacttcttgtcatcatcctacggaccgttaagcgggccaatggaggggaactgaagacaggctacttgtccatcgtcatggatccagatgaactcccattggatgaacattg

SEQ ID NO: 161 - protein, 712 aa, Homo Sapiens
MQSKVLLAVALWLCVETRAASVGLPSVSLDLPRLSIQKDILTIKANTTLQITCRGQRDLDWLWPNNQSGSEQRVEVTECSDGLFCKTLTIPKVIGNDTGAYKCFYRETDLASVIYVYVQDYRSPFIASVSDQHGVVYITENKNKTVVIPCLGSISNLNVSLCARYPEKRFVPDGNRISWDSKKGFTIPSYMISYAGMVFCEAKINDESYQSIMYIVVVVGYRIYDVVLSPSHGIELSVGEKLVLNCTARTELNVGIDFNWEYPSSKHQHKKLVNRDLKTQSGSEMKKFLSTLTIDGVTRSDQGLYTCAASSGLMTKKNSTFVRVHEKPFVAFGSGMESLVEATVGERVRIPAKYLGYPPPEIKWYKNGIPLESNHTIKAGHVLTIMEVSERDTGNYTVILTNPISKEKQSHVVSLVVYVPPQIGEKSLISPVDSYQYGTTQTLTCTVYAIPPPHHIHWYWQLEEECANEPSQAVSVTNPYPCEEWRSVEDFQGGNKIEVNKNQFALIEGKNKTVSTLVIQAANVSALYKCEAVNKVGRGERVISFHVTRGPEITLQPDMQPTEQESVSLWCTADRSTFENLTWYKLGPQPLPIHVGELPTPVCKNLDTLWKLNATMFSNSTNDILIMELKNASLQDQGDYVCLAQDRKTKKRHCVVRQLTVLERVAPTITGNLENQTTSIGESIEVSCTASGNPPPQIMWFKDNETLVEDSE

SEQ ID NO: 162 - DNA, 2620 bp, Homo Sapiens
gcagcggccggagatgcagcggggcgccgcgctgtgcctgcgactgtggctctgcctgggactcctggacggcctggtgagtggctactccatgacccccccgaccttgaacatcacggaggagtcacacgtcatcgacaccggtgacagcctgtccatctcctgcaggggacagcaccccctcgagtgggcttggccaggagctcaggaggcgccagccaccggagacaaggacagcgaggacacgggggtggtgcgagactgcgagggcacagacgccaggccctactgcaaggtgttgctgctgcacgaggtacatgccaacgacacaggcagctacgtctgctactacaagtacatcaaggcacgcatcgagggcaccacggccgccagctcctacgtgttcgtgagagactttgagcagccattcatcaacaagcctgacacgctcttggtcaacaggaaggacgccatgtgggtgccctgtctggtgtccatccccggcctcaatgtcacgctgcgctcgcaaagctcggtgctgtggccagacgggcaggaggtggtgtgggatgaccggcggggcatgctcgtgtccacgccactgctgcacgatgccctgtacctgcagtgcgagaccacctggggagaccaggacttcctttccaaccccttcctggtgcacatcacaggcaacgagctctatgacatccagctgttgcccaggaagtcgctggagctgctggtaggggagaagctggtcctgaactgcaccgtgtgggctgagtttaactcaggtgtcacctttgactgggactacccagggaagcaggcagagcggggtaagtgggtgcccgagcgacgctcccagcagacccacacagaactctccagcatcctgaccatccacaacgtcagccagcacgacctgggctcgtatgtgtgcaaggccaacaacggcatccagcgatttcgggagagcaccgaggtcattgtgcatgaaaatcccttcatcagcgtcgagtggctcaaaggacccatcctggaggccacggcaggagacgagctggtgaagctgcccgtgaagctggcagcgtaccccccgcccgagttccagtggtacaaggatggaaaggcactgtccgggcgccacagtccacatgccctggtgctcaaggaggtgacagaggccagcacaggcacctacaccctcgccctgtggaactccgctgctggcctgaggcgcaacatcagcctggagctggtggtgaatgtgcccccccagatacatgagaaggaggcctcctcccccagcatctactcgcgtcacagccgccaggccctcacctgcacggcctacggggtgcccctgcctctcagcatccagtggcactggcggccctggacaccctgcaagatgtttgcccagcgtagtctccggcggcggcagcagcaagacctcatgccacagtgccgtgactggagggcggtgaccacgcaggatgccgtgaaccccatcgagagcctggacacctggaccgagtttgtggagggaaagaataagactgtgagcaagctggtgatccagaatgccaacgtgtctgccatgtacaagtgtgtggtctccaacaaggtgggccaggatgagcggctcatctacttctatgtgaccaccatccccgacggcttcaccatcgaatccaagccatccgaggagctactagagggccagccggtgctcctgagctgccaagccgacagctacaagtacgagcatctgcgctggtaccgcctcaacctgtccacgctgcacgatgcgcacgggaacccgcttctgctcgactgcaagaacgtgcatctgttcgccacccctctggccgccagcctggaggaggtggcacctggggcgcgccacgccacgctcagcctgagtatcccccgcgtcgcgcccgagcacgagggccactatgtgtgcgaagtgcaagaccggcgcagccatgacaagcactgccacaagaagtacctgtcggtgcaggccctggaagcccctcggctcacgcagaacttgaccgacctcctggtgaacgtgagcgactcgctggagatgcagtgcttggtggccggagcgcacgcgcccagcatcgtgtggtacaaagacgagaggctgctggaggaaaagtctggtagggagggtggccctggcgaagggcaggtccggaggcccgcgaggccgacgatcccaaacccaggtggacccgcacctccaccccaccccctgcaggagtcgacttggcggactccaaccagaagctgagcatccagcgcgtgcgcgaggaggatgcgggacgctatctgtgcagcgtgtgcaacgccaagggctgcgtcaactcctccgccagcgtggccgtggaaggctccgaggataagggcagcatggagatcgtgatccttgtcggtaccggcgtcatcgctgtcttcttctgggtcctcctcctcctcatcttctgtaacatgaggaggccggcccacgcagacatcaagacgggctacctgtccatcatcatggaccccggggaggtgcctctggaggagcaatgcgaatacctgtcctacgatgccagcc

SEQ ID NO: 163 - protein, 765 aa, Homo Sapiens
MQRGAALCLRLWLCLGLLDGLVSGYSMTPPTLNITEESHVIDTGDSLSISCRGQHPLEWAWPGAQEAPATGDKDSEDTGVVRDCEGTDARPYCKVLLLHEVHANDTGSYVCYYKYIKARIEGTTAASSYVFVRDFEQPFINKPDTLLVNRKDAMWVPCLVSIPGLNVTLRSQSSVLWPDGQEVVWDDRRGMLVSTPLLHDALYLQCETTWGDQDFLSNPFLVHITGNELYDIQLLPRKSLELLVGEKLVLNCTVWAEFNSGVTFDWDYPGKQAERGKWVPERRSQQTHTELSSILTIHNVSQHDLGSYVCKANNGIQRFRESTEVIVHENPFISVEWLKGPILEATAGDELVKLPVKLAAYPPPEFQWYKDGKALSGRHSPHALVLKEVTEASTGTYTLALWNSAAGLRRNISLELVVNVPPQIHEKEASSPSIYSRHSRQALTCTAYGVPLPLSIQWHWRPWTPCKMFAQRSLRRRQQQDLMPQCRDWRAVTTQDAVNPIESLDTWTEFVEGKNKTVSKLVIQNANVSAMYKCVVSNKVGQDERLIYFYVTTIPDGFTIESKPSEELLEGQPVLLSCQADSYKYEHLRWYRLNLSTLHDAHGNPLLLDCKNVHLFATPLAASLEEVAPGARHATLSLSIPRVAPEHEGHYVCEVQDRRSHDKHCHKKYLSVQALEAPRLTQNLTDLLVNVSDSLEMQCLVAGAHAPSIVWYKDERLLEEKSGREGGPGEGQVRRPARPTIPNPGGPAPPPHPLQESTWRTPTRS

SEQ ID NO: 164 - DNA, 3096 bp, Homo sapiens
  ref <308>: DATABASE ACCESSION NUMBER: GenBank No. NM006182
  ref <309>: DATABASE ENTRY DATE: 2004-10-26
catcttgcatcagcctgtggatgtatgcctaccaccgggctccttcaccagcaaagtggaaaaagaagcgtttcacaacaaattcttctttttgggttggggaaacgcagtggattatagctctgttttcttctttccaaaactgtgcacccctggatgaaacctccatcaagggagacctacaagttgcctggggttcagtgctctagaaagttccaaggtttgtggcttgaattattctaaagaagctgaaataattgaagagaagcagaggccagctgtttttgaggatcctgctccacagagaatgctctgcacccgttgatactccagttccaacaccatcttctgagatgatcctgattcccagaatgctcttggtgctgttcctgctgctgcctatcttgagttctgcaaaagctcaggttaatccagctatatgccgctatcctctgggcatgtcaggaggccagattccagatgaggacatcacagcttccagtcagtggtcagagtccacagctgccaaatatggaaggctggactcagaagaaggggatggagcctggtgccctgagattccagtggaacctgatgacctgaaggagtttctgcagattgacttgcacaccctccattttatcactctggtggggacccaggggcgccatgcaggaggtcatggcatcgagtttgcccccatgtacaagatcaattacagtcgggatggcactcgctggatctcttggcggaaccgtcatgggaaacaggtgctggatggaaatagtaacccctatgacattttcctaaaggacttggagccgcccattgtagccagatttgtccggttcattccagtcaccgaccactccatgaatgtgtgtatgagagtggagctttacggctgtgtctggctagatggcttggtgtcttacaatgctccagctgggcagcagtttgtactccctggaggttccatcatttatctgaatgattctgtctatgatggagctgttggatacagcatgacagaagggctaggccaattgaccgatggtgtgtctggcctggacgatttcacccagacccatgaataccacgtgtggcccggctatgactatgtgggctggcggaacgagagtgccaccaatggctacattgagatcatgtttgaatttgaccgcatcaggaatttcactaccatgaaggtccactgcaacaacatgtttgctaaaggtgtgaagatctttaaggaggtacagtgctacttccgctctgaagccagtgagtgggaacctaatgccatttccttcccccttgtcctggatgacgtcaaccccagtgctcggtttgtcacggtgcctctccaccaccgaatggccagtgccatcaagtgtcaataccattttgcagatacctggatgatgttcagtgagatcaccttccaatcagatgctgcaatgtacaacaactctgaagccctgcccacctctcctatggcacccacaacctatgatccaatgcttaaagttgatgacagcaacactcggatcctgattggctgcttggtggccatcatctttatcctcctggccatcattgtcatcatcctctggaggcagttctggcagaaaatgctggagaaggcttctcggaggatgctggatgatgaaatgacagtcagcctttccctgccaagtgattctagcatgttcaacaataaccgctcctcatcacctagtgaacaagggtccaactcgacttacgatcgcatctttccccttcgccctgactaccaggagccatccaggctgatacgaaaactcccagaatttgctccaggggaggaggagtcaggctgcagcggtgttgtgaagccagtccagcccagtggccctgagggggtgccccactatgcagaggctgacatagtgaacctccaaggagtgacaggaggcaacacatactcagtgcctgccgtcaccatggacctgctctcaggaaaagatgtggctgtggaggagttccccaggaaactcctaactttcaaagagaagctgggagaaggacagtttggggaggttcatctctgtgaagtggagggaatggaaaaattcaaagacaaagattttgccctagatgtcagtgccaaccagcctgtcctggtggctgtgaaaatgctccgagcagatgccaacaagaatgccaggaatgattttcttaaggagataaagatcatgtctcggctcaaggacccaaacatcatccatctattatctgtgtgtatcactgatgaccctctctgtatgatcactgaatacatggagaatggagatctcaatcagtttctttcccgccacgagccccctaattcttcctccagcgatgtacgcactgtcagttacaccaatctgaagtttatggctacccaaattgcctctggcatgaagtacctttcctctcttaattttgttcaccgagatctggccacacgaaactgtttagtgggtaagaactacacaatcaagatagctgactttggaatgagcaggaacctgtacagtggtgactattaccggatccagggccgggcagtgctccctatccgctggatgtcttgggagagtatcttgctgggcaagttcactacagcaagtgatgtgtgggcctttggggttactttgtgggagactttcaccttttgtcaagaacagccctattcccagctgtcagatgaacaggttattgagaatactggagagttcttccgagaccaagggaggcagacttacctccctcaaccagccatttgtcctgactctgtgtataagctgatgctcagctgctggagaagagatacgaagaaccgtccctcattccaagaaatccaccttctgctccttcaacaaggcgacgagtgatgctgtcagtgcctggccatgttcctacggctcaggtcctccctacaagacctaccactcacccatgcctatgccactccatctggacatttaatgaaactgagagacagaggcttgtttgctttgccctcttttcctggtcacccccactccctacccctgactcatatatact

SEQ ID NO: 165 - DNA, 5616 bp, Homo sapiens
  ref <308>: DATABASE ACCESSION NUMBER: GenBank No. NM005228
  ref <309>: DATABASE ENTRY DATE: 2005-01-26
ccccggcgcagcgcggccgcagcagcctccgccccccgcacggtgtgagcgcccgacgcggccgaggcggccggagtcccgagctagccccggcggccgccgccgcccagaccggacgacaggccacctcgtcggcgtccgcccgagtccccgcctcgccgccaacgccacaaccaccgcgcacggccccctgactccgtccagtattgatcgggagagccggagcgagctcttcggggagcagcgatgcgaccctccgggacggccggggcagcgctcctggcgctgctggctgcgctctgcccggcgagtcgggctctggaggaaaagaaagtttgccaaggcacgagtaacaagctcacgcagttgggcacttttgaagatcattttctcagcctccagaggatgttcaataactgtgaggtggtccttgggaatttggaaattacctatgtgcagaggaattatgatctttccttcttaaagaccatccaggaggtggctggttatgtcctcattgccctcaacacagtggagcgaattcctttggaaaacctgcagatcatcagaggaaatatgtactacgaaaattcctatgccttagcagtcttatctaactatgatgcaaataaaaccggactgaaggagctgcccatgagaaatttacaggaaatcctgcatggcgccgtgcggttcagcaacaaccctgccctgtgcaacgtggagagcatccagtggcgggacatagtcagcagtgactttctcagcaacatgtcgatggacttccagaaccacctgggcagctgccaaaagtgtgatccaagctgtcccaatgggagctgctggggtgcaggagaggagaactgccagaaactgaccaaaatcatctgtgcccagcagtgctccgggcgctgccgtggcaagtcccccagtgactgctgccacaaccagtgtgctgcaggctgcacaggcccccgggagagcgactgcctggtctgccgcaaattccgagacgaagccacgtgcaaggacacctgccccccactcatgctctacaaccccaccacgtaccagatggatgtgaaccccgagggcaaatacagctttggtgccacctgcgtgaagaagtgtccccgtaattatgtggtgacagatcacggctcgtgcgtccgagcctgtggggccgacagctatgagatggaggaagacggcgtccgcaagtgtaagaagtgcgaagggccttgccgcaaagtgtgtaacggaataggtattggtgaatttaaagactcactctccataaatgctacgaatattaaacacttcaaaaactgcacctccatcagtggcgatctccacatcctgccggtggcatttaggggtgactccttcacacatactcctcctctggatccacaggaactggatattctgaaaaccgtaaaggaaatcacagggtttttgctgattcaggcttggcctgaaaacaggacggacctccatgcctttgagaacctagaaatcatacgcggcaggaccaagcaacatggtcagttttctcttgcagtcgtcagcctgaacataacatccttgggattacgctccctcaaggagataagtgatggagatgtgataatttcaggaaacaaaaatttgtgctatgcaaatacaataaactggaaaaaactgtttgggacctccggtcagaaaaccaaaattataagcaacagaggtgaaaacagctgcaaggccacaggccaggtctgccatgccttgtgctcccccgagggctgctggggcccggagcccagggactgcgtctcttgccggaatgtcagccgaggcagggaatgcgtggacaagtgcaaccttctggagggtgagccaagggagtttgtggagaactctgagtgcatacagtgccacccagagtgcctgcctcaggccatgaacatcacctgcacaggacggggaccagacaactgtatccagtgtgcccactacattgacggcccccactgcgtcaagacctgcccggcaggagtcatgggagaaaacaacaccctggtctggaagtacgcagacgccggccatgtgtgccacctgtgccatccaaactgcacctacggatgcactgggccaggtcttgaaggctgtccaacgaatgggcctaagatcccgtccatcgccactgggatggtgggggccctcctcttgctgctggtggtggccctggggatcggcctcttcatgcgaaggcgccacatcgttcggaagcgcacgctgcggaggctgctgcaggagagggagcttgtggagcctcttacacccagtggagaagctcccaaccaagctctcttgaggatcttgaaggaaactgaattcaaaaagatcaaagtgctgggctccggtgcgttcggcacggtgtataagggactctggatcccagaaggtgagaaagttaaaattcccgtcgctatcaaggaattaagagaagcaacatctccgaaagccaacaaggaaatcctcgatgaagcctacgtgatggccagcgtggacaacccccacgtgtgccgcctgctgggcatctgcctcacctccaccgtgcagctcatcacgcagctcatgcccttcggctgcctcctggactatgtccgggaacacaaagacaatattggctcccagtacctgctcaactggtgtgtgcagatcgcaaagggcatgaactacttggaggaccgtcgcttggtgcaccgcgacctggcagccaggaacgtactggtgaaaacaccgcagcatgtcaagatcacagattttgggctggccaaactgctgggtgcggaagagaaagaataccatgcagaaggaggcaaagtgcctatcaagtggatggcattggaatcaattttacacagaatctatacccaccagagtgatgtctggagctacggggtgaccgtttgggagttgatgacctttggatccaagccatatgacggaatccctgccagcgagatctcctccatcctggagaaaggagaacgcctccctcagccacccatatgtaccatcgatgtctacatgatcatggtcaagtgctggatgatagacgcagatagtcgcccaaagttccgtgagttgatcatcgaattctccaaaatggcccgagacccccagcgctaccttgtcattcagggggatgaaagaatgcatttgccaagtcctacagactccaacttctaccgtgccctgatggatgaagaagacatggacgacgtggtggatgccgacgagtacctcatcccacagcagggcttcttcagcagcccctccacgtcacggactcccctcctgagctctctgagtgcaaccagcaacaattccaccgtggcttgcattgatagaaatgggctgcaaagctgtcccatcaaggaagacagcttcttgcagcgatacagctcagaccccacaggcgccttgactgaggacagcatagacgacaccttcctcccagtgcctgaatacataaaccagtccgttcccaaaaggcccgctggctctgtgcagaatcctgtctatcacaatcagcctctgaaccccgcgcccagcagagacccacactaccaggacccccacagcactgcagtgggcaaccccgagtatctcaacactgtccagcccacctgtgtcaacagcacattcgacagccctgcccactgggcccagaaaggcagccaccaaattagcctggacaaccctgactaccagcaggacttctttcccaaggaagccaagccaaatggcatctttaagggctccacagctgaaaatgcagaatacctaagggtcgcgccacaaagcagtgaatttattggagcatgaccacggaggatagtatgagccctaaaaatccagactctttcgatacccaggaccaagccacagcaggtcctccatcccaacagccatgcccgcattagctcttagacccacagactggttttgcaacgtttacaccgactagccaggaagtacttccacctcgggcacattttgggaagttgcattcctttgtcttcaaactgtgaagcatttacagaaacgcatccagcaagaatattgtccctttgagcagaaatttatctttcaaagaggtatatttgaaaaaaaaaaaaagtatatgtgaggatttttattgattggggatcttggagtttttcattgtcgctattgatttttacttcaatgggctcttccaacaaggaagaagcttgctggtagcacttgctaccctgagttcatccaggcccaactgtgagcaaggagcacaagccacaagtcttccagaggatgcttgattccagtggttctgcttcaaggcttccactgcaaaacactaaagatccaagaaggccttcatggccccagcaggccggatcggtactgtatcaagtcatggcaggtacagtaggataagccactctgtcccttcctgggcaaagaagaaacggaggggatggaattcttccttagacttacttttgtaaaaatgtccccacggtacttactccccactgatggaccagtggtttccagtcatgagcgttagactgacttgtttgtcttccattccattgttttgaaactcagtatgctgcccctgtcttgctgtcatgaaatcagcaagagaggatgacacatcaaataataactcggattccagcccacattggattcatcagcatttggaccaatagcccacagctgagaatgtggaatacctaaggatagcaccgcttttgttctcgcaaaaacgtatctcctaatttgaggctcagatgaaatgcatcaggtcctttggggcatagatcagaagactacaaaaatgaagctgctctgaaatctcctttagccatcaccccaaccccccaaaattagtttgtgttacttatggaagatagttttctccttttacttcacttcaaaagctttttactcaaagagtatatgttccctccaggtcagctgcccccaaaccccctccttacgctttgtcacacaaaaagtgtctctgccttgagtcatctattcaagcacttacagctctggccacaacagggcattttacaggtgcgaatgacagtagcattatgagtagtgtggaattcaggtagtaaatatgaaactagggtttgaaattgataatgctttcacaacatttgcagatgttttagaaggaaaaaagttccttcctaaaataatttctctacaattggaagattggaagattcagctagttaggagcccaccttttttcctaatctgtgtgtgccctgtaacctgactggttaacagcagtcctttgtaaacagtgttttaaactctcctagtcaatatccaccccatccaatttatcaaggaagaaatggttcagaaaatattttcagcctacagttatgttcagtcacacacacatacaaaatgttccttttgcttttaaagtaatttttgactcccagatcagtcagagcccctacagcattgttaagaaagtatttgatttttgtctcaatgaaaataaaactatattcatttccactctaaaaaaaaaaaaaaaaa

SEQ ID NO: 166 - DNA, 3963 bp, Homo sapiens
  ref <308>: DATABASE ACCESSION NUMBER: GenBank No. NM004431
  ref <309>: DATABASE ENTRY DATE: 2004-12-20
attaaggactcggggcaggaggggcagaagttgcgcgcaggccggcgggcgggagcggacaccgaggccggcgtgcaggcgtgcgggtgtgcgggagccgggctcggggggatcggaccgagagcgagaagcgcggcatggagctccaggcagcccgcgcctgcttcgccctgctgtggggctgtgcgctggccgcggccgcggcggcgcagggcaaggaagtggtactgctggactttgctgcagctggaggggagctcggctggctcacacacccgtatggcaaagggtgggacctgatgcagaacatcatgaatgacatgccgatctacatgtactccgtgtgcaacgtgatgtctggcgaccaggacaactggctccgcaccaactgggtgtaccgaggagaggctgagcgtatcttcattgagctcaagtttactgtacgtgactgcaacagcttccctggtggcgccagctcctgcaaggagactttcaacctctactatgccgagtcggacctggactacggcaccaacttccagaagcgcctgttcaccaagattgacaccattgcgcccgatgagatcaccgtcagcagcgacttcgaggcacgccacgtgaagctgaacgtggaggagcgctccgtggggccgctcacccgcaaaggcttctacctggccttccaggatatcggtgcctgtgtggcgctgctctccgtccgtgtctactacaagaagtgccccgagctgctgcagggcctggcccacttccctgagaccatcgccggctctgatgcaccttccctggccactgtggccggcacctgtgtggaccatgccgtggtgccaccggggggtgaagagccccgtatgcactgtgcagtggatggcgagtggctggtgcccattgggcagtgcctgtgccaggcaggctacgagaaggtggaggatgcctgccaggcctgctcgcctggattttttaagtttgaggcatctgagagcccctgcttggagtgccctgagcacacgctgccatcccctgagggtgccacctcctgcgagtgtgaggaaggcttcttccgggcacctcaggacccagcgtcgatgccttgcacacgacccccctccgccccacactacctcacagccgtgggcatgggtgccaaggtggagctgcgctggacgccccctcaggacagcgggggccgcgaggacattgtctacagcgtcacctgcgaacagtgctggcccgagtctggggaatgcgggccgtgtgaggccagtgtgcgctactcggagcctcctcacggactgacccgcaccagtgtgacagtgagcgacctggagccccacatgaactacaccttcaccgtggaggcccgcaatggcgtctcaggcctggtaaccagccgcagcttccgtactgccagtgtcagcatcaaccagacagagccccccaaggtgaggctggagggccgcagcaccacctcgcttagcgtctcctggagcatccccccgccgcagcagagccgagtgtggaagtacgaggtcacttaccgcaagaagggagactccaacagctacaatgtgcgccgcaccgagggtttctccgtgaccctggacgacctggccccagacaccacctacctggtccaggtgcaggcactgacgcaggagggccagggggccggcagcaaggtgcacgaattccagacgctgtccccggagggatctggcaacttggcggtgattggcggcgtggctgtcggtgtggtcctgcttctggtgctggcaggagttggcttctttatccaccgcaggaggaagaaccagcgtgcccgccagtccccggaggacgtttacttctccaagtcagaacaactgaagcccctgaagacatacgtggacccccacacatatgaggaccccaaccaggctgtgttgaagttcactaccgagatccatccatcctgtgtcactcggcagaaggtgatcggagcaggagagtttggggaggtgtacaagggcatgctgaagacatcctcggggaagaaggaggtgccggtggccatcaagacgctgaaagccggctacacagagaagcagcgagtggacttcctcggcgaggccggcatcatgggccagttcagccaccacaacatcatccgcctagagggcgtcatctccaaatacaagcccatgatgatcatcactgagtacatggagaatggggccctggacaagttccttcgggagaaggatggcgagttcagcgtgctgcagctggtgggcatgctgcggggcatcgcagctggcatgaagtacctggccaacatgaactatgtgcaccgtgacctggctgcccgcaacatcctcgtcaacagcaacctggtctgcaaggtgtctgactttggcctgtcccgcgtgctggaggacgaccccgaggccacctacaccaccagtggcggcaagatccccatccgctggaccgccccggaggccatttcctaccggaagttcacctctgccagcgacgtgtggagctttggcattgtcatgtgggaggtgatgacctatggcgagcggccctactgggagttgtccaaccacgaggtgatgaaagccatcaatgatggcttccggctccccacacccatggactgcccctccgccatctaccagctcatgatgcagtgctggcagcaggagcgtgcccgccgccccaagttcgctgacatcgtcagcatcctggacaagctcattcgtgcccctgactccctcaagaccctggctgactttgacccccgcgtgtctatccggctccccagcacgagcggctcggagggggtgcccttccgcacggtgtccgagtggctggagtccatcaagatgcagcagtatacggagcacttcatggcggccggctacactgccatcgagaaggtggtgcagatgaccaacgacgacatcaagaggattggggtgcggctgcccggccaccagaagcgcatcgcctacagcctgctgggactcaaggaccaggtgaacactgtggggatccccatctgagcctcgacagggcctggagccccatcggccaagaatacttgaagaaacagagtggcctccctgctgtgccatgctgggccactggggactttatttatttctagttctttcctccccctgcaacttccgctgaggggtctcggatgacaccctggcctgaactgaggagatgaccagggatgctgggctgggccctctttccctgcgagacgcacacagctgagcacttagcaggcaccgccacgtcccagcatccctggagcaggagccccgccacagccttcggacagacatataggatattcccaagccgaccttccctccgccttctcccacatgaggccatctcaggagatggagggcttggcccagcgccaagtaaacagggtacctcaagccccatttcctcacactaagagggcagactgtgaacttgactgggtgagacccaaagcggtccctgtccctctagtgccttctttagaccctcgggccccatcctcatccctgactggccaaacccttgctttcctgggcctttgcaagatgcttggttgtgttgaggtttttaaatatatattttgtactttgtggagagaatgtgtgtgtgtggcagggggccccgccagggctggggacagagggtgtcaaacattcgtgagctggggactcagggaccggtgctgcaggagtgtcctgcccatgccccagtcggccccatctctcatccttttggataagtttctattctgtcagtgttaaagattttgttttgttggacatttttttcgaatcttaatttattattttttttatatttattgttagaaaatgacttatttctgctctggaataaagttgcagatgattcaaaccgaaaaaaaaaaaaaaaaaa

SEQ ID NO: 167 - DNA, 5826 bp, Homo sapiens
  ref <308>: DATABASE ACCESSION NUMBER: GenBank No. NM005233
  ref <309>: DATABASE ENTRY DATE: 2004-11-16
cccgctctgcttcagcgcacgctgaagacggcactaggacccagggaagtccccgagcggggttcgcggaaaggcagccagactcctccttatctccagtgtcaaacttgacatcagcctgcgagcggagcatggtaacttctccagcaatcagagcgctccccctcacatcagtggcatgcttcatggagatatgctcctctcactgccctctgcaccagcaacatggattgtcagctctccatcctcctccttctcagctgctctgttctcgacagcttcggggaactgattccgcagccttccaatgaagtcaatctactggattcaaaaacaattcaaggggagctgggctggatctcttatccatcacatgggtgggaagagatcagtggtgtggatgaacattacacacccatcaggacttaccaggtgtgcaatgtcatggaccacagtcaaaacaattggctgagaacaaactgggtccccaggaactcagctcagaagatttatgtggagctcaagttcactctacgagactgcaatagcattccattggttttaggaacttgcaaggagacattcaacctgtactacatggagtctgatgatgatcatggggtgaaatttcgagagcatcagtttacaaagattgacaccattgcagctgatgaaagtttcactcaaatggatcttggggaccgtattctgaagctcaacactgagattagagaagtaggtcctgtcaacaagaagggattttatttggcatttcaagatgttggtgcttgtgttgccttggtgtctgtgagagtatacttcaaaaagtgcccatttacagtgaagaatctggctatgtttccagacacggtacccatggactcccagtccctggtggaggttagagggtcttgtgtcaacaattctaaggaggaagatcctccaaggatgtactgcagtacagaaggcgaatggcttgtacccattggcaagtgttcctgcaatgctggctatgaagaaagaggttttatgtgccaagcttgtcgaccaggtttctacaaggcattggatggtaatatgaagtgtgctaagtgcccgcctcacagttctactcaggaagatggttcaatgaactgcaggtgtgagaataattacttccgggcagacaaagaccctccatccatggcttgtacccgacctccatcttcaccaagaaatgttatctctaatataaacgagacctcagttatcctggactggagttggcccctggacacaggaggccggaaagatgttaccttcaacatcatatgtaaaaaatgtgggtggaatataaaacagtgtgagccatgcagcccaaatgtccgcttcctccctcgacagtttggactcaccaacaccacggtgacagtgacagaccttctggcacatactaactacacctttgagattgatgccgttaatggggtgtcagagctgagctccccaccaagacagtttgctgcggtcagcatcacaactaatcaggctgctccatcacctgtcctgacgattaagaaagatcggacctccagaaatagcatctctttgtcctggcaagaacctgaacatcctaatgggatcatattggactacgaggtcaaatactatgaaaagcaggaacaagaaacaagttataccattctgagggcaagaggcacaaatgttaccatcagtagcctcaagcctgacactatatacgtattccaaatccgagcccgaacagccgctggatatgggacgaacagccgcaagtttgagtttgaaactagtccagactctttctccatctctggtgaaagtagccaagtggtcatgatcgccatttcagcggcagtagcaattattctcctcactgttgtcatctatgttttgattgggaggttctgtggctataagtcaaaacatggggcagatgaaaaaagacttcattttggcaatgggcatttaaaacttccaggtctcaggacttatgttgacccacatacatatgaagaccctacccaagctgttcatgagtttgccaaggaattggatgccaccaacatatccattgataaagttgttggagcaggtgaatttggagaggtgtgcagtggtcgcttaaaacttccttcaaaaaaagagatttcagtggccattaagaccctgaaagttggctacacagaaaagcagaggagagacttcctgggagaagcaagcattatgggacagtttgaccaccccaatatcattcgactggaaggagttgttaccaaaagtaagccagttatgattgtcacagaatacatggagaatggttccttggatagtttcctacgtaaacacgatgcccagtttactgtcattcagctagtggggatgcttcgagggatagcatctggcatgaagtacctgtcagacatgggctatgttcaccgagacctcgctgctcggaacatcttgatcaacagtaacttggtgtgtaaggtttctgatttcggactttcgcgtgtcctggaggatgacccagaagctgcttatacaacaagaggagggaagatcccaatcaggtggacatcaccagaagctatagcctaccgcaagttcacgtcagccagcgatgtatggagttatgggattgttctctgggaggtgatgtcttatggagagagaccatactgggagatgtccaatcaggatgtaattaaagctgtagatgagggctatcgactgccaccccccatggactgcccagctgccttgtatcagctgatgctggactgctggcagaaagacaggaacaacagacccaagtttgagcagattgttagtattctggacaagcttatccggaatcccggcagcctgaagatcatcaccagtgcagccgcaaggccatcaaaccttcttctggaccaaagcaatgtggatatcactaccttccgcacaacaggtgactggcttaatggtgtctggacagcacactgcaaggaaatcttcacgggtgtggagtacagttcttgtgacacaatagccaagatttccacagatgacatgaaaaaggttggtgtcaccgtggttgggccacagaagaagatcatcagtagcattaaagctctagaaacgcaatcaaagaatggcccagttcccgtgtaaagcacgggacggaagtgcttctggacggaagtggtggctgtggaaggcgtagcatcatcctgcagacagacaataattctggagatactggtggaagttccaagtccaataagacactcaaatatgagtacaaatgccttaaaatggaattgaaaaactctttattttcccctatcatttattggatgggtgggtggggtatttttttgtaattgcttttttaaatattagttaatggattaaatttaattcttcagcgtaaaatggtgaagaactagcatatagccattgatcataaactgactatcataaaatcaaaacaagtgaaataacaaaatggacatggtggctttgtttaggtagagccacaaaagaaaagacttgtaatatttttatatacagaggaaatctgtaacaggtattttgtttcttttaaagcaagcaacacagaggaatttatacctcaaactatctggccatatttactaccttatcactgcattattctcttttatctgtttaaagcatatagagatgaagtttgtagttgttttaagtactacacatttttaaattgttagcttccttaagtatatcatgtaaagaaatgtcttaatttttgaaaaaagtacatatttattttcttttgaattgtttttattgttttctatttatgccttgatgatttaatatggatttgttacagccaagtgccaaatgctctctcaaattgtcagcaatttaactagacacagataataatgggtttctttcagattttttgaaccatccacttacatatatttttaaaaaatgaaatccttttcctgttcatacactaaccaaatctctcaaatctgttatcccaatcattgttgcctctccgtttattataaactgtatgctcacaacttagtgtaatataccagcttgtatgcaatggattttcaaccagataacatacctttcctgctctggtgcttagagactatcaactccctcctttagtgaaggagccgtgttagagcttccgagaatagctccactggagagaagtggaatcctatatagaatgctgcactaattgacaacacagcctataggccaatgcatgagtaaaaaaaaaaacaattactggctcactggctttgaaaagtcacttactattgttgctgaaacttgctgagctgtttatagagaatgatgataacagaacttttcctctgtatcactggtgtttaggtgaattaattaaacattgtgatcattagtaccaggtattattatctttaagagtcttccacttcaatgcacatggtgcagttttggtgtgtaacttagaaggattgaacttctttgaatttactggacataacattttcagaatagttggtcatctagcaaccgcctcaaaatgtgtaagcaggagagaaatttctcatcacagggatttagacttactattacataaaggctaactatgagcttgctcattaattttgaaaagatgtacctggtggatatctagctagtaatatattctgaagcaacattttagctctattgatactctttctaatgctgatatgatcttgagtataagaaatgcatatgtcactagaatggataaaataatgctgcaaacttaatgttcttatgcaaaatggaacgctaatgaaacacagcttacaatcgcaaatcaaaactcacaagtgctcatctgttgtagatttagtgtaataagacttagattgtgctccttcggatatgattgtttctcaaatcttggcaatattccttagtcaaatcaggctactagaattctgtattggatatataagagcatgaaatttttaaaaatacacttgtgattataaaattaatcacaaatttcacttatacctgctatcagcagctagaaaacattttttttttaaatcaagtattttgtgtttggaatgttagaatgagatctgaatgtggtttcaatctaattttttcccagactactattttcttttttaggtactattctgagcatactcaacaaaacccatgcatttcataaactaatagaagttgaggattgttgaatctatttcacttattttggctgtggtttccatctgaaagtagaggttgtatacaccatatactgttcttcattttattaatatttttctccttgacctctcataaatttactttacacaattcttaccctgtacatatgtaaacataagtgtacgattcttaaccatggagtagaggtactagaatgcttacggccatctctttgtacaggaactgcattgactttcagtaaacataaagccacaactcctacatgatgttatgtaccatatgatctgttttgtatcttaaatttgatttacatatattatttatttctggtaactcactcagtttatgctgtgctaaatatcaatcaagccatgtataaatgtgatatgattggcaatatgtgtttactttaaacttgtcttttcaaaatattactcagtttatgttgtacaatgtagatggcctcttactaatgtaaaatgatttgtagtggaaacatttatatttttataataaacataatgaaaatattttttacagattggaaaaaaaaaaaaaaaaaaa

SEQ ID NO: 168 - DNA, 6364 bp, Homo sapiens
  ref <308>: DATABASE ACCESSION NUMBER: GenBank No. NM004438
  ref <309>: DATABASE ENTRY DATE: 2004-11-16
ctgggatagaagcggcaggagcagcgttggcaccggcgaaccatggctgggattttctatttcgccctattttcgtgtctcttcgggatttgcgacgctgtcacaggttccagggtataccccgcgaatgaagttaccttattggattccagatctgttcagggagaacttgggtggatagcaagccctctggaaggagggtgggaggaagtgagtatcatggatgaaaaaaatacaccaatccgaacctaccaagtgtgcaatgtgatggaacccagccagaataactggctacgaactgattggatcacccgagaaggggctcagagggtgtatattgagattaaattcaccttgagggactgcaatagtcttccgggcgtcatggggacttgcaaggagacgtttaacctgtactactatgaatcagacaacgacaaagagcgtttcatcagagagaaccagtttgtcaaaattgacaccattgctgctgatgagagcttcacccaagtggacattggtgacagaatcatgaagctgaacaccgagatccgggatgtagggccattaagcaaaaaggggttttacctggcttttcaggatgtgggggcctgcatcgccctggtatcagtccgtgtgttctataaaaagtgtccactcacagtccgcaatctggcccagtttcctgacaccatcacaggggctgatacgtcttccctggtggaagttcgaggctcctgtgtcaacaactcagaagagaaagatgtgccaaaaatgtactgtggggcagatggtgaatggctggtacccattggcaactgcctatgcaacgctgggcatgaggagcggagcggagaatgccaagcttgcaaaattggatattacaaggctctctccacggatgccacctgtgccaagtgcccaccccacagctactctgtctgggaaggagccacctcgtgcacctgtgaccgaggctttttcagagctgacaacgatgctgcctctatgccctgcacccgtccaccatctgctcccctgaacttgatttcaaatgtcaacgagacatctgtgaacttggaatggagtagccctcagaatacaggtggccgccaggacatttcctataatgtggtatgcaagaaatgtggagctggtgaccccagcaagtgccgaccctgtggaagtggggtccactacaccccacagcagaatggcttgaagaccaccaaagtctccatcactgacctcctagctcataccaattacacctttgaaatctgggctgtgaatggagtgtccaaatataaccctaacccagaccaatcagtttctgtcactgtgaccaccaaccaagcagcaccatcatccattgctttggtccaggctaaagaagtcacaagatacagtgtggcactggcttggctggaaccagatcggcccaatggggtaatcctggaatatgaagtcaagtattatgagaaggatcagaatgagcgaagctatcgtatagttcggacagctgccaggaacacagatatcaaaggcctgaaccctctcacttcctatgttttccacgtgcgagccaggacagcagctggctatggagacttcagtgagcccttggaggttacaaccaacacagtgccttcccggatcattggagatggggctaactccacagtccttctggtctctgtctcgggcagtgtggtgctggtggtaattctcattgcagcttttgtcatcagccggagacggagtaaatacagtaaagccaaacaagaagcggatgaagagaaacatttgaatcaaggtgtaagaacatatgtggacccctttacgtacgaagatcccaaccaagcagtgcgagagtttgccaaagaaattgacgcatcctgcattaagattgaaaaagttataggagttggtgaatttggtgaggtatgcagtgggcgtctcaaagtgcctggcaagagagagatctgtgtggctatcaagactctgaaagctggttatacagacaaacagaggagagacttcctgagtgaggccagcatcatgggacagtttgaccatccgaacatcattcacttggaaggcgtggtcactaaatgtaaaccagtaatgatcataacagagtacatggagaatggctccttggatgcattcctcaggaaaaatgatggcagatttacagtcattcagctggtgggcatgcttcgtggcattgggtctgggatgaagtatttatctgatatgagctatgtgcatcgtgatctggccgcacggaacatcctggtgaacagcaacttggtctgcaaagtgtctgattttggcatgtcccgagtgcttgaggatgatccggaagcagcttacaccaccaggggtggcaagattcctatccggtggactgcgccagaagcaattgcctatcgtaaattcacatcagcaagtgatgtatggagctatggaatcgttatgtgggaagtgatgtcgtacggggagaggccctattgggatatgtccaatcaagatgtgattaaagccattgaggaaggctatcggttaccccctccaatggactgccccattgcgctccaccagctgatgctagactgctggcagaaggagaggagcgacaggcctaaatttgggcagattgtcaacatgttggacaaactcatccgcaaccccaacagcttgaagaggacagggacggagagctccagacctaacactgccttgttggatccaagctcccctgaattctctgctgtggtatcagtgggcgattggctccaggccattaaaatggaccggtataaggataacttcacagctgctggttataccacactagaggctgtggtgcacgtgaaccaggaggacctggcaagaattggtatcacagccatcacgcaccagaataagattttgagcagtgtccaggcaatgcgaacccaaatgcagcagatgcacggcagaatggttcccgtctgagccagtactgaataaactcaaaactcttgaaattagtttacctcatccatgcactttaattgaagaactgcactttttttacttcgtcttcgccctctgaaattaaagaaatgaaaaaaaaaaacaatatctgcagcgttgcttggtgcacagattgctgaaactgtggggcttacagaaatgactgccggtcatttgaatgagacctggaacaaatcgtttctcagaagtacttttctgttcatcaccagtctgtaaaatacatgtacctatagaaatagaacactgcctctgagttttgatgctgtatttgctgccagacactgagcttctgagacatccctgattctctctccatttggaattacaaccattgtattttgtttgtggcataaattacagtcatctgtctttcactggaatgaagaccatgcctaggaacattttttaaggactcagctgtggcttttagggcttggttcataccatgggggaaaaaaaagtcctaggagaaagcgacgtggctcattagtgttgcctcttcagtgctcaagccgcctggtggattcctatgacacagggggcctggaaagaaagggaaagtggatttaaaatatatatatacgtaacccaagccccataacccctaactggacaaatgaggtctgtttctttgggcctgaggctgtgccatataaagtcttattttgggactttacaaacttgtcctaactatcttgtggatagtgggctgtgacaatctggaatagagaacgttcacacttcgctcctttaaagaagcgaccccagatctgcaagggagtagattctgctatcttggcctcacagcccttcctgttgattacaaagcccgtggaagaaaacagaacacaccctcctcagttccgtctaaatgtgtttcttctgcttcaattacaccagttctggggcaaagacactgatgaaacaacacccatacctgaaaagaataaatgtgtgactttcaaatcccctttcgcagtgaaagaaacagcaaacacttaagattcagcatctgttctccagttgcactgaggaatgcactgtctcgcagcaccagctctgcagagcccttgccccagactctttgcggttttatttatatgtatttccatatttcattcctgtgtgtcactgctgcattggtgtggcagcaagtgaccaaatgctacaggtcttactatggacaccaggtcaggtgcaaccacacaaaacaaagccagttccatgagctgcctatgatatgcattgcggaagtaacattttacccagggtgtgccattgcagtgatataaatatatttttttcttagactaaatatgagctgactatctcttttgatgtgtgtacataggtgtgagtgtgtgtgtatgcgtgcctgtctgtgtgcgggtgtgtgtatgtgcatagcctcatgcttaggactacccatgaatgttgtggaatgctacacctggagagttctggttttccaccagtttcaagatgaagaactacatgatacagtggacctggagaccatccccttggaaagacaacccagagatgttcagcatcctgtatctacacgcatcctgtatctacacgtgtattttgtagctgtcacactaaccttaataagaattctacagctttggacagaggcattttcaccttaatggtgaagtaatttaaaatataaatccattcaggtgacaacccatcatcaaaattacaaattttctgattgaactcatctgaatcatcagttccttgatggagagagagaaggagatggaatgtgtctggtaaccccaaatggagtacaagtagcctttgttttcctgcataaatggacttgttgaatgcgaacgaatatatgcaattcatatacttttggagatgaacgtagatatgtgtgtcagctttgagatggtgtgtcctggattaatactttgtctcccaatatcacagaaaaatacatgccagtgactcttgaggttaaggtagttgggatgaaatggcctcaggcaatttcacattccctaattacctggaaagttctacagtaattaatatgcagctaactcctgttgccctcacaagagcatcagccttctagaatcggagctccggagtgtgaagattcagtattgatatgatatgtataccaaactccagccaacttactgccatttttcataatctgagtggctgccttgcttatcctaagctgtggttgcagaaaccgtggccatttatataagctataacatcaaatcagggaaaaatgaggaaaaaaaatagattctgaaccatttattgttgaataagtagagaaaatcatcaataaatatttattacattctgacagggtgtgtggcattgtgttctatgccagagtgacaaagttgattcacccctttttggggaccttaatatattttttaagggatgtgcctatgcattgatgcctgaaaaatatgtataaagaaatgaggttgactcttctgagcagttcatcttttccagaggtaagggtaggaggccaacttcagggtctgggtctgagcccgtgggcaagccctggccgagtgagctccaatgctaactcatgtgccgatctctagagcagtgggaaactaccccgctgcaccaaatcaagtagcttcaccttgtgtatgcaggccccaagttattttttagcaatcttacgagtgaaatgttctggtgggttgaaaaacgttcttattttaaagaaaggttgtgctcgctacactgctggtgtgtgcattctgagacctcttgtattcaatctgtgaaggatatgtgtattaatccgtacacccgtatagcctcaatatttgtctgaagacacttaaattctgacccataaaggaaagttctagaagcaatattttcacttatttaacattctccaaacaacatcaagcattgatacacactgaagagtgcgtttattttttgtatcactctaagtatgttggaatatgcaaggactgtggttcaaattagaatgtataaggcatattataatttagttcatactgaataagaaattaacagaacattgttcggttcacacgttccaaactttgagtgatttctggagttagacatagattttctattttgttttaatttgtcaaggtatttttcttcccttcatgaactttaggtacacataacttatgtcatttatttatggtcttttatacctagtttgtaaaattgtaaaatagcaaactaaatgcaaagagtttgcatttgaaaataataaagtagttgccgtatacaaccctgcaaaaaaaaaaaaaaaaaa

SEQ ID NO: 169 - DNA, 3162 bp, Homo sapiens
  ref <308>: DATABASE ACCESSION NUMBER: GenBank No. L36644
  ref <309>: DATABASE ENTRY DATE: 1995-08-10
ccagcgtccctggccggctgctactctgcacctcgacgggctcccctctggacgtgccttctcctgtgcgccgcactccggaccctcctggccagccccagcaacgaagtgaatttattggattcacgcactgtcatgggggacctgggatggattgcttttccaaaaaatgggtgggaagagattggtgaagtggatgaaaattatgcccctatccacacataccaagtatgcaaagtgatggaacagaatcagaataactggcttttgaccagttggatctccaatgaaggtgcttccagaatcttcatagaactcaaatttaccctgcgggactgcaacagccttcctggaggactggggacctgtaaggaaacctttaatatgtattactttgagtcagatgatcagaatgggagaaacatcaaggaaaaccaatacatcaaaattgataccattgctgccgatgaaagctttacagaacttgatcttggtgaccgtgttatgaaactgaatacagaggtcagagatgtaggacctctaagcaaaaagggattttatcttgcttttcaagatgttggtgcttgcattgctctggtttctgtgcgtgtatactataaaaaatgcccttctgtggtacgacacttggctgtcttccctgacaccatcactggagctgattcttcccaattgctcgaagtgtcaggctcctgtgtcaaccattctgtgaccgatgaacctcccaaaatgcactgcagcgccgaaggggagtggctggtgcccatcgggaaatgcatgtgcaaggcaggatatgaagagaaaaatggcacctgtcaagtgtgcagacctgggttcttcaaagcctcacctcacatccagagctgcggcaaatgtccacctcacagttatacccatgaggaagcttcaacctcttgtgtctgtgaaaaggattatttcaggagagagtctgatccacccacaatggcatgcacaagacccccctctgctcctcggaatgccatctcaaatgttaatgaaactagtgtctttctggaatggattccgcctgctgacactggtggaaggaaagacgtgtcatattatattgcatgcaagaagtgcaactcccatgcaggtgtgtgtgaggagtgtggcggtcatgtcaggtaccttccccggcaaagcggcctgaaaaacacctctgtcatgatggtggatctactcgctcacacaaactatacctttgagattgaggcagtgaatggagtgtccgacttgagcccaggagcccggcagtatgtgtctgtaaatgtaaccacaaatcaagcagctccatctccagtcaccaatgtgaaaaaagggaaaattgcaaaaaacagcatctctttgtcttggcaagaaccagatcgtcccaatggaatcatcctagagtatgaaatcaagcattttgaaaaggaccaagagaccagctacacgattatcaaatctaaagagacaactattactgcagagggcttgaaaccagcttcagtttatgtcttccaaattcgagcacgtacagcagcaggctatggtgtcttcagtcgaagatttgagtttgaaaccaccccagtgtttgcagcatccagcgatcaaagccagattcctgtaattgctgtgtctgtgacagtaggagtcattttgttggcagtggttatcggcgtcctcctcagtggaaggcggtgtggctacagcaaagcaaaacaagatccagaagaggaaaagatgcattttcataatgggcacattaaactgccaggagtaagaacttacattgatccacatacctatgaggatcccaatcaagctgtccacgaatttgccaaggagatagaagcatcatgtatcaccattgagagagttattggagcaggtgaatttggtgaagtttgtagtggacgtttgaaactaccaggaaaaagagaattacctgtggctatcaaaacccttaaagtaggctatactgaaaagcaacgcagagatttcctaggtgaagcaagtatcatgggacagtttgatcatcctaacatcatccatttagaaggtgtggtgaccaaaagtaaaccagtgatgatcgtgacagagtatatggagaatggctctttagatacatttttgaagaaaaacgatgggcagttcactgtgattcagcttgttggcatgctgagaggtatctctgcaggaatgaagtacctttctgacatgggctatgtgcatagagatcttgctgccagaaacatcttaatcaacagtaaccttgtgtgcaaagtgtctgactttggactttcccgggtactggaagatgatcccgaggcagcctacaccacaaggggaggaaaaattccaatcagatggactgccccagaagcaatagctttccgaaagtttacttctgccagtgatgtctggagttatggaatagtaatgtgggaagttgtgtcttatggagagagaccctactgggagatgaccaatcaagatgtgattaaagcggtagaggaaggctatcgtctgccaagccccatggattgtcctgctgctctctatcagttaatgctggattgctggcagaaagagcgaaatagcaggcccaagtttgatgaaatagtcaacatgttggacaagctgatacgtaacccaagtagtctgaagacgctggttaatgcatcctgcagagtatctaatttattggcagaacatagcccactaggatctggggcctacagatcagtaggtgaatggctagaggcaatcaagatgggccggtatacagagattttcatggaaaatggatacagttcaatggacgctgtggctcaggtgaccttggaggatttgagacggcttggagtgactcttgtcggtcaccagaagaagatcatgaacagccttcaagaaatgaaggtgcagctggtaaacggaatggtgccattgtaacttcatgtaaatgtcgcttcttcaagtgaatgattctgcactttgtaaacagcactgagatttattttaacaaaaaaagggggaaaagggaaaacagtgatttctaaaccttagaaaacatttgcctcagccacagaatttgtaatcatggttttactgaagtatccagttcttagtccttagtct

SEQ ID NO: 170 - DNA, 1619 bp, Homo sapiens
  ref <308>: DATABASE ACCESSION NUMBER: GenBank No. AL133666
  ref <309>: DATABASE ENTRY DATE: 2005-01-20
aggaaagctaagacaaacaaaactacaatggaagaagaaaacgtcctcaactagacatctgccaaaaatatcatccagaatgccctggcaagttcacttccatttagtgaagtgagataatttggcaattcacgcaagagactgagaaccaagcctcaagccctgcctctgattctgcaggtatggaacatgagcagctgacctactcttccacaaggtccaaagcccccagtgtcatcatcacaggtcttaagccagccaccaaatatgtatttcacatccgagtgagaactgcgacaggatacagtggctacagtcagaaatttgaatttgaaacaggagatgaaagactctccatttcaagtgacaaaactgtactggcttaatgaaaagtgggactttattgcctcagcttctgacatggcagcagaacaaggacagattctcgtgatagccaccgccgctgttggcggattcactctcctcgtcatcctcactttattcttcttgatcactgggagatgtcagtggtacataaaagccaagatgaagtcagaagagaagagaagaaaccacttacagaatgggcatttgcgcttcccgggaattaaaacttacattgatccagatacatatgaagacccatccctagcagtccatgaatttgcaaaggagattgatccctcaagaattcgtattgagagagtcattggggcaggtgaatttggagaagtctgtagtgggcgtttgaagacaccagggaaaagagagatcccagttgccattaaaactttgaaaggtggccacatggatcggcaaagaagagattttctaagagaagctagtatcatgggccagtttgaccatccaaacatcattcgcctagaaggggttgtcaccaaaagatccttcccggccattggggtggaggcgttttgccccagcttcctgagggcagggtttttaaatagcatccaggccccgcatccagtgccagggggaggatctttgccccccaggattcctgctggcagaccagtaatgattgtggtggaatatatggagaatggatccctagactcctttttgcggaagcatgatggccacttcacagtcatccagttggtcggaatgctccgaggcattgcatcaggcatgaagtatctttctgatatgggttatgttcatcgagacctagcggctcggaatatactggtcaatagcaacttagtatgcaaagtttctgattttggtctctccagagtgctggaagatgatccagaagctgcttatacaacaactgacctcttccaaactctaacacttaacctctgctattctgcataaattctgagaaaagccaaattttctgtcggtctaagaagacatagcctacacccaactggagataattataaaaaataatgaagcagcatgaggggaaggtatttaatgtgtattttaaagttgggagagattctccttcacctaatttaggtgtttgtgaattggcttgactttttgaagttaatttttaagccttgaacatgtccaactttaagaactttaagaataaatattttaacacaagtgaaaaaaaaaaaaaaaaaaaaaaaagg

SEQ ID NO: 171 - DNA, 4996 bp, Homo sapiens
  ref <308>: DATABASE ACCESSION NUMBER: GenBank No. NM004440
  ref <309>: DATABASE ENTRY DATE: 2005-01-26
gcgccggggtgtgcgcccggccgggtgtgcggagagcgagggagcgcgctccctcccgacgcgcgggccgcagcggccaagcccgagggtgcgtggcgcccccgcccgcccggcccggcccggccatggcccccgcccggggccgcctgccccctgcgctctgggtcgtcacggccgcggcggcggcggccacctgcgtgtccgcggcgcgcggcgaagtgaatttgctggacacgtcgaccatccacggggactggggctggctcacgtatccggctcatgggtgggactccatcaacgaggtggacgagtccttccagcccatccacacgtaccaggtttgcaacgtcatgagccccaaccagaacaactggctgcgcacgagctgggtcccccgagacggcgcccggcgcgtctatgctgagatcaagtttaccctgcgcgactgcaacagcatgcctggtgtgctgggcacctgcaaggagaccttcaacctctactacctggagtcggaccgcgacctgggggccagcacacaagaaagccagttcctcaaaatcgacaccattgcggccgacgagagcttcacaggtgccgaccttggtgtgcggcgtctcaagctcaacacggaggtgcgcagtgtgggtcccctcagcaagcgcggcttctacctggccttccaggacataggtgcctgcctggccatcctctctctccgcatctactataagaagtgccctgccatggtgcgcaatctggctgccttctcggaggcagtgacgggggccgactcgtcctcactggtggaggtgaggggccagtgcgtgcggcactcagaggagcgggacacacccaagatgtactgcagcgcggagggcgagtggctcgtgcccatcggcaaatgcgtgtgcagtgccggctacgaggagcggcgggatgcctgtgtggcctgtgagctgggcttctacaagtcagcccctggggaccagctgtgtgcccgctgccctccccacagccactccgcagctccagccgcccaagcctgccactgtgacctcagctactaccgtgcagccctggacccgccgtcctcagcctgcacccggccaccctcggcaccagtgaacctgatctccagtgtgaatgggacatcagtgactctggagtgggcccctcccctggacccaggtggccgcagtgacatcacctacaatgccgtgtgccgccgctgcccctgggcactgagccgctgcgaggcatgtgggagcggcacccgctttgtgccccagcagacaagcctggtgcaggccagcctgctggtggccaacctgctggcccacatgaactactccttctggatcgaggccgtcaatggcgtgtccgacctgagccccgagccccgccgggccgctgtggtcaacatcaccacgaaccaggcagccccgtcccaggtggtggtgatccgtcaagagcgggcggggcagaccagcgtctcgctgctgtggcaggagcccgagcagccgaacggcatcatcctggagtatgagatcaagtactacgagaaggacaaggagatgcagagctactccaccctcaaggccgtcaccaccagagccaccgtctccggcctcaagccgggcacccgctacgtgttccaggtccgagcccgcacctcagcaggctgtggccgcttcagccaggccatggaggtggagaccgggaaaccccggccccgctatgacaccaggaccattgtctggatctgcctgacgctcatcacgggcctggtggtgcttctgctcctgctcatctgcaagaagaggcactgtggctacagcaaggccttccaggactcggacgaggagaagatgcactatcagaatggacaggcacccccacctgtcttcctgcctctgcatcaccccccgggaaagctcccagagccccagttctatgcggaaccccacacctacgaggagccaggccgggcgggccgcagtttcactcgggagatcgaggcctctaggatccacatcgagaaaatcatcggctctggagactccggggaagtctgctacgggaggctgcgggtgccagggcagcgggatgtgcccgtggccatcaaggccctcaaagccggctacacggagagacagaggcgggacttcctgagcgaggcgtccatcatggggcaattcgaccatcccaacatcatccgcctcgagggtgtcgtcacccgtggccgcctggcaatgattgtgactgagtacatggagaacggctctctggacaccttcctgaggacccacgacgggcagttcaccatcatgcagctggtgggcatgctgagaggagtgggtgccggcatgcgctacctctcagacctgggctatgtccaccgagacctggccgcccgcaacgtcctggttgacagcaacctggtctgcaaggtgtctgacttcgggctctcacgggtgctggaggacgacccggatgctgcctacaccaccacgggcgggaagatccccatccgctggacggccccagaggccatcgccttccgcaccttctcctcggccagcgacgtgtggagcttcggcgtggtcatgtgggaggtgctggcctatggggagcggccctactggaacatgaccaaccgggatgtcatcagctctgtggaggaggggtaccgcctgcccgcacccatgggctgcccccacgccctgcaccagctcatgctcgactgttggcacaaggaccgggcgcagcggcctcgcttctcccagattgtcagtgtcctcgatgcgctcatccgcagccctgagagtctcagggccaccgccacagtcagcaggtgcccaccccctgccttcgtccggagctgctttgacctccgagggggcagcggtggcggtgggggcctcaccgtgggggactggctggactccatccgcatgggccggtaccgagaccacttcgctgcgggcggatactcctctctgggcatggtgctacgcatgaacgcccaggacgtgcgcgccctgggcatcaccctcatgggccaccagaagaagatcctgggcagcattcagaccatgcgggcccagctgaccagcacccaggggccccgccggcacctctgatgtacagccagcagggcccaggcagccaccaagcccaccccaggtcatgccagcggcagaggacgtgaggggctggcagcaggcagggcggccccaggcctctgccctcctctcaggtgctggaggagctgaaggcttcgccacaggacctggagttatcaggggtcaggcgcctgggaaggggcctttggtggccaccctggtgaggacacctgtcccccagggcaggcaccttctcttttccagagcctggggcctccacgtcacagagtccaacagggacatcactcgcctgcctctgtgtgcgtgcatgtgtgtgtgtggtggggggtgttctcacaaggtcatgggatctcatgtgaacagtgtgtgatcaagtgtgtccaccccttcgggtctcagcatggacgtgtgcatgttatgagcgtgtgcttatccgttaaggctggaggcacatgtgggtgatggtggatgatgtgtcatgaatgaggaggtgtgtgagcagggaactcagtgtgacaccgccaggtccagcacccatgggggcgggggagaggctcacccctacgtccccccacacctggaggctggagccaggggccacttctgaactgcaccagcaccaggcccaccctcgtctctgcctgggtgagcccaccccggctgtatctcaggtctgggtcctccctctagccgaggaggccacctgcagcctccacccggctctcaccgctgcttcaacaggaaaacagggttcccggtcagtccggctggccgccttcatggaggcatcatggcagagcacatgagatgtcctcagctgggcttggctgcctggccagggccgggggctcagcagcctcctctagcctctgatgccttccctccacggcccaggtctcctcactcaaagtcccttcgccaacctttcaatgcccagccctgacacctgccctttgtcccccaggcctaggatcagggaccagaggatcctatcttctcagcacccagcccaccccttcctgtagcatatggggagactaaggcctggagagaggggtgatgccccgtcccaggttgcactgcaaccaagtgtcagagtcggggctccggcctcctgccaaggctcttgtccccatacaccatcccacaagggcgctgggggtggaagtgccctggaagcccctcccctctcacactgacctccccccttacggcccaccagggtatgtaaatatctcttttctaccatgtcagaatattttttcctcactcctgacaatgcaaaaatggtcttcaaagcacataaaaagcacccagggtgagaaagccccatcccgggggccgttggcaggcagggaagcaggaaccccaccgtgtgccccctgccagccccagagggagtggcgagcccagctgcccagccctgccccccctccccatagccagcacagctatcccgcggggacaccagcactgagccccctctccctcctgcaataattcggggagtctcagccccatccaggtgccgcggccagctctctacacctctatatattatattactatatagccgagctgttcttccttcctatggaagtcggaaacatggtcagaacacgatctgggggggggatcctgtcttcctccccaccccaccccactcttacccaatttctgggctctggatcctcacagtcatggaggcaccgtgggcctggcacttgcaaaagtgtggcccctcactctagtgtgtggtccctctcagggtcctggggatctgcctctctgtggtctccatcctgactcttgaacttacccacaataagaataaattctgcctcatcttt

SEQ ID NO: 172 - DNA, 5229 bp, Homo sapiens
  ref <308>: DATABASE ACCESSION NUMBER: GenBank No. NM020526
  ref <309>: DATABASE ENTRY DATE: 2004-11-16
gcagtcggagacttgcaggcagcaaacacggtgcgagcgaacaggagtgggggggaaattaaaaaaagctaaacgtggagcagccgatcggggaccgagaaggggaatcgatgcaaggagcacaataaaacaaaagctacttcggaacaaacagcatttaaaaatccacgactcaagataactgaaacctaaaataaaacctgctcatgcaccatggtttttcaaactcggtacccttcatggattattttatgctacatctggctgctccgctttgcacacacaggggaggcgcaggctgcgaaggaagtactactgctggattctaaagcacaacaaacagagttggagtggatttcctctccacccaatgggtgggaagaaattagtggtttggatgagaactataccccgatacgaacataccaggtgtgccaagtcatggagcccaaccaaaacaactggctgcggactaactggatttccaaaggcaatgcacaaaggatttttgtagaattgaaattcaccctgagggattgtaacagtcttcctggagtactgggaacttgcaaggaaacatttaatttgtactattatgaaacagactatgacactggcaggaatataagagaaaacctctatgtaaaaatagacaccattgctgcagatgaaagttttacccaaggtgaccttggtgaaagaaagatgaagcttaacactgaggtgagagagattggacctttgtccaaaaagggattctatcttgcctttcaggatgtaggggcttgcatagctttggtttctgtcaaagtgtactacaagaagtgctggtccattattgagaacttagctatctttccagatacagtgactggttcagaattttcctctttagtcgaggttcgagggacatgtgtcagcagtgcagaggaagaagcggaaaacgcccccaggatgcactgcagtgcagaaggagaatggttagtgcccattggaaaatgtatctgcaaagcaggctaccagcaaaaaggagacacttgtgaaccctgtggccgtgggttctacaagtcttcctctcaagatcttcagtgctctcgttgtccaactcacagtttttctgataaagaaggctcctccagatgtgaatgtgaagatgggtattacagggctccatctgacccaccatacgttgcatgcacaaggcctccatctgcaccacagaacctcattttcaacatcaaccaaaccacagtaagtttggaatggagtcctcctgcagacaatgggggaagaaacgatgtgacctacagaatattgtgtaagcggtgcagttgggagcagggcgaatgtgttccctgtgggagtaacattggatacatgccccagcagactggattagaggataactatgtcactgtcatggacctgctagcccacgctaattatacttttgaagttgaagctgtaaatggagtttctgacttaagccgatcccagaggctctttgctgctgtcagtatcaccactggtcaagcagctccctcgcaagtgagcggagtaatgaaggagagagtactgcagcggagtgtcgagctttcctggcaggaaccagagcatcccaatggagtcatcacagaatatgaaatcaagtattacgagaaagatcaaagggaacggacctactcaacagtaaaaaccaagtctacttcagcctccattaataatctgaaaccaggaacagtgtatgttttccagattcgggcttttactgctgctggttatggaaattacagtcccagacttgatgttgctacactagaggaagctacaggtaaaatgtttgaagctacagctgtctccagtgaacagaatcctgttattatcattgctgtggttgctgtagctgggaccatcattttggtgttcatggtctttggcttcatcattgggagaaggcactgtggttatagcaaagctgaccaagaaggcgatgaagagctttactttcattttaaatttccaggcaccaaaacctacattgaccctgaaacctatgaggacccaaatagagctgtccatcaattcgccaaggagctagatgcctcctgtattaaaattgagcgtgtgattggtgcaggagaattcggtgaagtctgcagtggccgtttgaaacttccagggaaaagagatgttgcagtagccataaaaaccctgaaagttggttacacagaaaaacaaaggagagactttttgtgtgaagcaagcatcatggggcagtttgaccacccaaatgttgtccatttggaaggggttgttacaagagggaaaccagtcatgatagtaatagagttcatggaaaatggagccctagatgcatttctcaggaaacatgatgggcaatttacagtcattcagttagtaggaatgctgagaggaattgctgctggaatgagatatttggctgatatgggatatgttcacagggaccttgcagctcgcaatattcttgtcaacagcaatctcgtttgtaaagtgtcagattttggcctgtcccgagttatagaggatgatccagaagctgtctatacaactactggtggaaaaattccagtaaggtggacagcacccgaagccatccagtaccggaaattcacatcagccagtgatgtatggagctatggaatagtcatgtgggaagttatgtcttatggagaaagaccttattgggacatgtcaaatcaagatgttataaaagcaatagaagaaggttatcgtttaccagcacccatggactgcccagctggccttcaccagctaatgttggattgttggcaaaaggagcgtgctgaaaggccaaaatttgaacagatagttggaattctagacaaaatgattcgaaacccaaatagtctgaaaactcccctgggaacttgtagtaggccaataagccctcttctggatcaaaacactcctgatttcactaccttttgttcagttggagaatggctacaagctattaagatggaaagatataaagataatttcacggcagctggctacaattcccttgaatcagtagccaggatgactattgaggatgtgatgagtttagggatcacactggttggtcatcaaaagaaaatcatgagcagcattcagactatgagagcacaaatgctacatttacatggaactggcattcaagtgtgatatgcatttctcccttttaagggagattacagactgcaagagaacagtactggccttcagtatatgcatagaatgctgctagaagacaagtgatgtcctgggtccttccaacagtgaagagaagatttaagaagcacctatagacttgaactcctaagtgccaccagaatatataaaaagggaatttaggatccaccatcggtggccaggaaaatagcagtgacaataaacaaagtactacctgaaaaacatccaaacaccttgagctctctaacctcctttttgtcttatagactttttaaaatgtacataaagaatttaagaaagaatatatttgtcaaataaaatcatgatcttattgttaaaattaatgaaatattttccttaaatatgtgatttcagactattcctttttaaaatcatttgtgtttattcttcataaggactttgttttagaaagctgtttatagctttggacctttttagtgttaaatctgtaacattactacactgggtacctttgaaagaatctcaaatttcaaaagaaatagcatgattgaagatacatctctgttagaacattggtatcctttttgtgccattttattctgtttaatcagtgctgttttgatattgtttgctaattggcaggtagtcaagaaaatgcaagttgccaagagctctgatattttttaaaaagaatttttttgtaaagatcagacaacacactatcttttcaatgaaaaaagcaataatgatccatacatactataaggcacttttaacagattgtttatagagtgattttactagaaagaatttaataaactcgaagtttaggtttatgagtatataaacaaatgaggcacttcatctgaagaatgttggtgaaggcaagtctctgaaagcagaactatccagtgttatctaaaaattaatctgagcacatcaagattttttcattctcgtgacattaggaaatttaggataaatagttgacatatattttatatcctcttctgttgaatgcagtccaaacatgaaaggaaataattgttttatattataactctgaagcatgataaaggggcagttcacaattttcaccatttaaacacaaatttgctgcacagaatatcaccattgcagttcaaaacaaaacaaaacaaaaagtcttttgtttgtgaacactgatgcaagaaacttgttaaatgaaaggactctttaccctagaaggaagaggtgaaggatctggcttgtttttaaagctttatttattaaaccatattatttgattactgtgttagaatttcataagcaataattaaatgtgtctttatagatattgcaggaatgtatacatattgtgattaatgctttcaaaacttatgaaaatcatgaactaccccagaattgaactgttgtacttccaaagagaattgggctgtttataatgattttaatagagaaagatcccagggatcggtcataattggtcttgtttgataatgtgggcatccacaaacaaacaaacaaataacagaaacaaaatctgtaaatgttcctttgtaaaacttgtaaattttatttatactgtcttgttttgtacacacatttctctgtagtgggctctgaatacattgaaaatgcactatatttttctattttacttgcagagcatcacaaaagaacaggtattttcagtgctacataatgtgttttcccacatttaggaccaaagacggctatagaaaaactcaaatggattgcttcccaaacccctccccaccctttttttttggttttaaatcactgtacagtgttatttgatattttaatttattttttgattgactagaaaaatcattttaatttcactaaaatgttttttgtccctaaggaaaagtaatctgtaaaaataattttaattagcataatacagtcacctagacacttccatttgtaatctttgtaatagactgtaaatatatttttggaactataaaaaaaaaaaaaaaa

SEQ ID NO: 173 - DNA, 3949 bp, Homo sapiens
  ref <308>: DATABASE ACCESSION NUMBER: GenBank No. AF025304
  ref <309>: DATABASE ENTRY DATE: 2000-11-29
gaattccgccccgggaagcgcagccatggctctgcggaggctgggggccgcgctgctgctgctgccgctgctcgccgccgtggaagaaacgctaatggactccactacagcgactgctgagctgggctggatggtgcatcctccatcagggtgggaagaggtgagtggctacgatgagaacatgaacacgatccgcacgtaccaggtgtgcaacgtgtttgagtcaagccagaacaactggctacggaccaagtttatccggcgccgtggcgcccaccgcatccacgtggagatgaagttttcggtgcgtgactgcagcagcatccccagcgtgcctggctcctgcaaggagaccttcaacctctattactatgaggctgactttgactcggccaccaagaccttccccaactggatggagaatccatgggtgaaggtggataccattgcagccgacgagagcttctcccaggtggacctgggtggccgcgtcatgaaaatcaacaccgaggtgcggagcttcggacctgtgtcccgcagcggcttctacctggccttccaggactatggcggctgcatgtccctcatcgccgtgcgtgtcttctaccgcaagtgcccccgcatcatccagaatggcgccatcttccaggaaaccctgtcgggggctgagagcacatcgctggtggctgcccggggcagctgcatcgccaatgcggaagaggtggatgtacccatcaagctctactgtaacggggacggcgagtggctggtgcccatcgggcgctgcatgtgcaaagcaggcttcgaggccgttgagaatggcaccgtctgccgaggttgtccatctgggactttcaaggccaaccaaggggatgaggcctgtacccactgtcccatcaacagccggaccacttctgaaggggccaccaactgtgtctgccgcaatggctactacagagcagacctggaccccctggacatgccctgcacaaccatcccctccgcgccccaggctgtgatttccagtgtcaatgagacctccctcatgctggagtggacccctccccgcgactccggaggccgagaggacctcgtctacaacatcatctgcaagagctgtggctcgggccggggtgcctgcacccgctgcggggacaatgtacagtacgcaccacgccagctaggcctgaccgagccacgcatttacatcagtgacctgctggcccacacccagtacaccttcgagatccaggctgtgaacggcgttactgaccagagccccttctcgcctcagttcgcctctgtgaacatcaccaccaaccaggcagctccatcggcagtgtccatcatgcatcaggtgagccgcaccgtggacagcattaccctgtcgtggtcccagccagaccagcccaatggcgtgatcctggactatgagctgcagtactatgagaaggagctcagtgagtacaacgccacagccataaaaagccccaccaacacggtcaccgtgcagggcctcaaagccggcgccatctatgtcttccaggtgcgggcacgcaccgtggcaggctacgggcgctacagcggcaagatgtacttccagaccatgacagaagccgagtaccagacaagcatccaggagaagttgccactcatcatcggctcctcggccgctggcctggtcttcctcattgctgtggttgtcatcgccatcgtgtgtaacagacgggggtttgagcgtgctgactcggagtacacggacaagctgcaacactacaccagtggccacatgaccccaggcatgaagatctacatcgatcctttcacctacgaggaccccaacgaggcagtgcgggagtttgccaaggaaattgacatctcctgtgtcaaaattgagcaggtgatcggagcaggggagtttggcgaggtctgcagtggccacctgaagctgccaggcaagagagagatctttgtggccatcaagacgctcaagtcgggctacacggagaagcagcgccgggacttcctgagcgaagcctccatcatgggccagttcgaccatcccaacgtcatccacctggagggtgtcgtgaccaagagcacacctgtgatgatcatcaccgagttcatggagaatggctccctggactcctttctccggcaaaacgatgggcagttcacagtcatccagctggtgggcatgcttcggggcatcgcagctggcatgaagtacctggcagacatgaactatgttcaccgtgacctggctgcccgcaacatcctcgtcaacagcaacctggtctgcaaggtgtcggactttgggctctcacgctttctagaggacgatacctcagaccccacctacaccagtgccctgggcggaaagatccccatccgctggacagccccggaagccatccagtaccggaagttcacctcggccagtgatgtgtggagctacggcattgtcatgtgggaggtgatgtcctatggggagcggccctactgggacatgaccaaccaggatgtaatcaatgccattgagcaggactatcggctgccaccgcccatggactgcccgagcgccctgcaccaactcatgctggactgttggcagaaggaccgcaaccaccggcccaagttcggccaaattgtcaacacgctagacaagatgatccgcaatcccaacagcctcaaagccatggcgcccctctcctctggcatcaacctgccgctgctggaccgcacgatccccgactacaccagctttaacacggtggacgagtggctggaggccatcaagatggggcagtacaaggagagcttcgccaatgccggcttcacctcctttgacgtcgtgtctcagatgatgatggaggacattctccgggttggggtcactttggctggccaccagaaaaaaatcctgaacagtatccaggtgatgcgggcgcagatgaaccagattcagtctgtggagggccagccactcgccaggaggccacgggccacgggaagaaccaagcggtgccagccacgagacgtcaccaagaaaacatgcaactcaaacgacggaaaaaaaaagggaatgggaaaaaagaaaacagatcctgggagggggcgggaaatacaaggaatattttttaaagaggattctcataaggaaagcaatgactgttcttgcgggggataaaaaagggcttgggagattcatgcgatgtgtccaatcggagacaaaagcagtttctctccaactccctctgggaaggtgacctggccagagccaagaaacactttcagaaaaacaaatgtgaaggggagagacaggggccacccttggctcctgtccctgctgctcctctaggcctcactcaacaaccaagcgcctggaggacgggacagatggacagacagccaccctgagaacccctctgggaaaatctattcctgccaccactgggcaaacagaagaatttttctgtctttggagagtattttagaaactccaatgaaagacactgtttctcctgttggctcacagggctgaaaggggcttttgtcctcctgggtcagggagaacgcggggaccccagaaaggtcagccttcctgaggatgggcaacccccaggtctgcagctccaggtacatatcacgcgcacagcctggcagcctggccctcctggtgcccactcccgccagcccctgcctcgaggactgatactgcagtgactgccgtcagctccgactgccgctgagaagggttgatcctgcatctgggtttgtttacagcaattcctggactcgggggtattttggtcacagggtggttttggtttagggggtttgtttgttgggttgttttttgttttttggttttttttaatgacaatgaagtgacactttgacatttccaaaaaaaaaaaaaaaaaaaaaaaaaaaaaaaaaaaaa

SEQ ID NO: 174 - DNA, 4234 bp, Homo sapiens
  ref <308>: DATABASE ACCESSION NUMBER: GenBank No. NM004443
  ref <309>: DATABASE ENTRY DATE: 2004-11-16
cgtgagcggcgcagcaagatcccagctcggaccccggacggcgcgcgcccccgaagccccggatcccagtcgggcccgcagctgaccgccagattactgtgcatcccgaatcacgaccacctgcaccctcctgccccggcccgccccccaagtcctcaggcacccagctccccggcgccccggatcctcctggaccggtccgtccagattcccgcgggaccgacctgtccgcatccccaggaccgccgggctcggtgcaccgcctcggtcccggagccgcccgcctggattgcattccctcctctcctggatctcctgggacccgacgcgagcctgccccggagcccgccgagcgcaccctctctcgggtgcctgcagccccgccggcgcggcccggcccggcgcggcccggctcggctcctagagctgccacggccatggccagagcccgcccgccgccgccgccgtcgccgccgccggggcttctgccgctgctccctccgctgctgctgctgccgctgctgctgctgcccgccggctgccgggcgctggaagagaccctcatggacacaaaatgggtaacatctgagttggcgtggacatctcatccagaaagtgggtgggaagaggtgagtggctacgatgaggccatgaatcccatccgcacataccaggtgtgtaatgtgcgcgagtcaagccagaacaactggcttcgcacggggttcatctggcggcgggatgtgcagcgggtctacgtggagctcaagttcactgtgcgtgactgcaacagcatccccaacatccccggctcctgcaaggagaccttcaacctcttctactacgaggctgacagcgatgtggcctcagcctcctcccccttctggatggagaacccctacgtgaaagtggacaccattgcacccgatgagagcttctcgcggctggatgccggccgtgtcaacaccaaggtgcgcagctttgggccactttccaaggctggcttctacctggccttccaggaccagggcgcctgcatgtcgctcatctccgtgcgcgccttctacaagaagtgtgcatccaccaccgcaggcttcgcactcttccccgagaccctcactggggcggagcccacctcgctggtcattgctcctggcacctgcatccctaacgccgtggaggtgtcggtgccactcaagctctactgcaacggcgatggggagtggatggtgcctgtgggtgcctgcacctgtgccaccggccatgagccagctgccaaggagtcccagtgccgcccctgtccccctgggagctacaaggcgaagcagggagaggggccctgcctcccatgtccccccaacagccgtaccacctccccagccgccagcatctgcacctgccacaataacttctaccgtgcagactcggactctgcggacagtgcctgtaccaccgtgccatctccaccccgaggtgtgatctccaatgtgaatgaaacctcactgatcctcgagtggagtgagccccgggacctgggtggccgggatgacctcctgtacaatgtcatctgcaagaagtgccatggggctggaggggcctcagcctgctcacgctgtgatgacaacgtggagtttgtgcctcggcagctgggcctgacggagcgccgggtccacatcagccatctgctggcccacacgcgctacacctttgaggtgcaggcggtcaacggtgtctcgggcaagagccctctgccgcctcgttatgcggccgtgaatatcaccacaaaccaggctgccccgtctgaagtgcccacactacgcctgcacagcagctcaggcagcagcctcaccctatcctgggcacccccagagcggcccaacggagtcatcctggactacgagatgaagtactttgagaagagcgagggcatcgcctccacagtgaccagccagatgaactccgtgcagctggacgggcttcggcctgacgcccgctatgtggtccaggtccgtgcccgcacagtagctggctatgggcagtacagccgccctgccgagtttgagaccacaagtgagagaggctctggggcccagcagctccaggagcagcttcccctcatcgtgggctccgctacagctgggcttgtcttcgtggtggctgtcgtggtcatcgctatcgtctgcctcaggaagcagcgacacggctctgattcggagtacacggagaagctgcagcagtacattgctcctggaatgaaggtttatattgacccttttacctacgaggaccctaatgaggctgttcgggagtttgccaaggagatcgacgtgtcctgcgtcaagatcgaggaggtgatcggagctggggaatttggggaagtgtgccgtggtcgactgaaacagcctggccgccgagaggtgtttgtggccatcaagacgctgaaggtgggctacaccgagaggcagcggcgggacttcctaagcgaggcctccatcatgggtcagtttgatcaccccaatataatccggctcgagggcgtggtcaccaaaagtcggccagttatgatcctcactgagttcatggaaaactgcgccctggactccttcctccggctcaacgatgggcagttcacggtcatccagctggtgggcatgttgcggggcattgctgccggcatgaagtacctgtccgagatgaactatgtgcaccgcgacctggctgctcgcaacatccttgtcaacagcaacctggtctgcaaagtctcagactttggcctctcccgcttcctggaggatgacccctccgatcctacctacaccagttccctgggcgggaagatccccatccgctggactgccccagaggccatagcctatcggaagttcacttctgctagtgatgtctggagctacggaattgtcatgtgggaggtcatgagctatggagagcgaccctactgggacatgagcaaccaggatgtcatcaatgccgtggagcaggattaccggctgccaccacccatggactgtcccacagcactgcaccagctcatgctggactgctgggtgcgggaccggaacctcaggcccaaattctcccagattgtcaataccctggacaagctcatccgcaatgctgccagcctcaaggtcattgccagcgctcagtctggcatgtcacagcccctcctggaccgcacggtcccagattacacaaccttcacgacagttggtgattggctggatgccatcaagatggggcggtacaaggagagcttcgtcagtgcggggtttgcatcttttgacctggtggcccagatgacggcagaagacctgctccgtattggggtcaccctggccggccaccagaagaagatcctgagcagtatccaggacatgcggctgcagatgaaccagacgctgcctgtgcaggtctgacaccggctcccacggggaccctgaggaccgtgcagggatgccaagcagccggctggactttcggactcttggacttttggatgcctggccttaggctgtggcccagaagctggaagtttgggaaaggcccaagctgggacttctccaggcctgtgttccctccccaggaagtgcgccccaaacctcttcatattgaagatggattaggagagggggtgatgacccctccccaagcccctcagggcccagaccttcctgctctccagcaggggatccccacaacctcacacttgtctgttcttcagtgctggaggtcctggcagggtcaggctggggtaagccggggttccacagggcccagccctggcaggggtctggccccccaggtaggcggagagcagtccctccctcaggaactggaggaggggactccaggaatggggaaatgtgacaccaccatcctgaagccagcttgcacctccagtttgcacagggatttgttctgggggctgagggccctgtccccacccccgcccttggtgctgtcataaaagggcaggcaggggcaggctgaggagttgccctttgccccccagagactgactctcagagccagagatgggatgtgtgagtgtgtgtgtgtgtgtgtgtgtgtgcgcgcgcgcgcgcgtgtgtgtgtgcacgcactggcctgcacagagagcatgggtgagcgtgtaaaagcttggccctgtgccctacaatggggccagctgggccgacagcagaataaaggcaataagatgaaaaaaaaaaaaaaa

SEQ ID NO: 175 - DNA, 4369 bp, Homo sapiens
  ref <308>: DATABASE ACCESSION NUMBER: GenBank No. NM004444
  ref <309>: DATABASE ENTRY DATE: 2004-11-16
ttccagcgcagctcagcccctgcccggcccggcccgcccggctccgcgccgcagtctccctccctcccgctccgtccccgctcgggctcccaccatccccgcccgcgaggagagcactcggcccggcggcgcgagcagagccactccagggagggggggagaccgcgagcggccggctcagcccccgccacccggggcgggaccccgaggccccggagggaccccaactccagccacgtcttgctgcgcgcccgcccggcgcggccactgccagcacgctccgggcccgccgcccgcgcgcgcggcacagacgcggggccacacttggcgccgccgcccggtgccccgcacgctcgcatgggcccgcgctgagggccccgacgaggagtcccgcgcggagtatcggcgtccacccgcccagggagagtcagacctgggggggcgagggccccccaaactcagttcggatcctacccgagtgaggcggcgccatggagctccgggtgctgctctgctgggcttcgttggccgcagctttggaagagaccctgctgaacacaaaattggaaactgctgatctgaagtgggtgacattccctcaggtggacgggcagtgggaggaactgagcggcctggatgaggaacagcacagcgtgcgcacctacgaagtgtgtgacgtgcagcgtgccccgggccaggcccactggcttcgcacaggttgggtcccacggcggggcgccgtccacgtgtacgccacgctgcgcttcaccatgctcgagtgcctgtccctgcctcgggctgggcgctcctgcaaggagaccttcaccgtcttctactatgagagcgatgcggacacggccacggccctcacgccagcctggatggagaacccctacatcaaggtggacacggtggccgcggagcatctcacccggaagcgccctggggccgaggccaccgggaaggtgaatgtcaagacgctgcgtctgggaccgctcagcaaggctggcttctacctggccttccaggaccagggtgcctgcatggccctgctatccctgcacctcttctacaaaaagtgcgcccagctgactgtgaacctgactcgattcccggagactgtgcctcgggagctggttgtgcccgtggccggtagctgcgtggtggatgccgtccccgcccctggccccagccccagcctctactgccgtgaggatggccagtgggccgaacagccggtcacgggctgcagctgtgctccggggttcgaggcagctgaggggaacaccaagtgccgagcctgtgcccagggcaccttcaagcccctgtcaggagaagggtcctgccagccatgcccagccaatagccactctaacaccattggatcagccgtctgccagtgccgcgtcgggtacttccgggcacgcacagacccccggggtgcaccctgcaccacccctccttcggctccgcggagcgtggtttcccgcctgaacggctcctccctgcacctggaatggagtgcccccctggagtctggtggccgagaggacctcacctacgccctccgctgccgggagtgccgacccggaggctcctgtgcgccctgcgggggagacctgacttttgaccccggcccccgggacctggtggagccctgggtggtggttcgagggctacgtcctgacttcacctatacctttgaggtcactgcattgaacggggtatcctccttagccacggggcccgtcccatttgagcctgtcaatgtcaccactgaccgagaggtacctcctgcagtgtctgacatccgggtgacgcggtcctcacccagcagcttgagcctggcctgggctgttccccgggcacccagtggggctgtgctggactacgaggtcaaataccatgagaagggcgccgagggtcccagcagcgtgcggttcctgaagacgtcagaaaaccgggcagagctgcgggggctgaagcggggagccagctacctggtgcaggtacgggcgcgctctgaggccggctacgggcccttcggccaggaacatcacagccagacccaactggatgagagcgagggctggcgggagcagctggccctgattgcgggcacggcagtcgtgggtgtggtcctggtcctggtggtcattgtggtcgcagttctctgcctcaggaagcagagcaatgggagagaagcagaatattcggacaaacacggacagtatctcatcggacatggtactaaggtctacatcgaccccttcacttatgaagaccctaatgaggctgtgagggaatttgcaaaagagatcgatgtctcctacgtcaagattgaagaggtgattggtgcaggtgagtttggcgaggtgtgccgggggcggctcaaggccccagggaagaaggagagctgtgtggcaatcaagaccctgaagggtggctacacggagcggcagcggcgtgagtttctgagcgaggcctccatcatgggccagttcgagcaccccaatatcatccgcctggagggcgtggtcaccaacagcatgcccgtcatgattctcacagagttcatggagaacggcgccctggactccttcctgcggctaaacgacggacagttcacagtcatccagctcgtgggcatgctgcggggcatcgcctcgggcatgcggtaccttgccgagatgagctacgtccaccgagacctggctgctcgcaacatcctagtcaacagcaacctcgtctgcaaagtgtctgactttggcctttcccgattcctggaggagaactcttccgatcccacctacacgagctccctgggaggaaagattcccatccgatggactgccccggaggccattgccttccggaagttcacttccgccagtgatgcctggagttacgggattgtgatgtgggaggtgatgtcatttggggagaggccgtactgggacatgagcaatcaggacgtgatcaatgccattgaacaggactaccggctgcccccgcccccagactgtcccacctccctccaccagctcatgctggactgttggcagaaagaccggaatgcccggccccgcttcccccaggtggtcagcgccctggacaagatgatccggaaccccgccagcctcaaaatcgtggcccgggagaatggcggggcctcacaccctctcctggaccagcggcagcctcactactcagcttttggctctgtgggcgagtggcttcgggccatcaaaatgggaagatacgaagaaagtttcgcagccgctggctttggctccttcgagctggtcagccagatctctgctgaggacctgctccgaatcggagtcactctggcgggacaccagaagaaaatcttggccagtgtccagcacatgaagtcccaggccaagccgggaaccccgggtgggacaggaggaccggccccgcagtactgacctgcaggaactccccaccccagggacaccgcctccccattttccggggcagagtggggactcacagaggcccccagccctgtgccccgctggattgcactttgagcccgtggggtgaggagttggcaatttggagagacaggatttgggggttctgccataataggaggggaaaatcaccccccagccacctcggggaactccagaccaagggtgagggcgcctttccctcaggactgggtgtgaccagaggaaaaggaagtgcccaacatctcccagcctccccaggtgcccccctcaccttgatgggtgcgttcccgcagaccaaagagagtgtgactcccttgccagctccagagtgggggggctgtcccagggggcaagaaggggtgtcagggcccagtgacaaaatcattggggtttgtagtcccaacttgctgctgtcaccaccaaactcaatcatttttttcccttgtaaatgcccctcccccagctgctgccttcatattgaaggtttttgagttttgtttttggtcttaatttttctccccgttccctttttgtttcttcgttttgtttttctaccgtccttgtcataactttgtgttggagggaacctgtttcactatggcctcctttgcccaagttgaaacaggggcccatcatcatgtctgtttccagaacagtgccttggtcatcccacatccccggaccccgcctgggacccccaagctgtgtcctatgaaggggtgtggggtgaggtagtgaaaagggcggtagttggtggtggaacccagaaacggacgccggtgcttggaggggttcttaaattatatttaaaaaagtaactttttgtataaataaaagaaaatgggacgtgtcccagctccaggggtaaaaaaaaaaaaaaaaaa

SEQ ID NO: 176 - DNA, 4059 bp, Homo sapiens
  ref <308>: DATABASE ACCESSION NUMBER: GenBank No. NM004445
  ref <309>: DATABASE ENTRY DATE: 2004-11-29
ggggcgggccgggccggcttgggaggggacgcggagggggcgggccgggctgcgttcgctccagccgcggctctacagcagcgggcggcgggacccgggacccagcttggcgacggcgatctcgacgcgggcccccaggatctcccggcgccccacctctggagcagcccctgccgccagcgtcaggtccaccccggaatcccagggactctcggcgccgaacggacccgggccgggtgcaacggggtccccggactggagaagacgcgggtggcaccgtgcgagctccaggagccccgggtccactgcgaggcctcggggggcgcagacctgcagagactgcggccaacgggaagaaataaagggattatagtccacccaattcacagacttctgagactcagacacgaggagagatagagaaccgccaatctctagatcaacaagcaaaggaggtgccaagcctgtttgtcttcattgtgacactggagtctagatgctgggaagtccaagatcagggtgccggcatggtcagttcctggcgaagcctctcttctaggtttcagactgccctcttctttgttgtgtcctcgaatggcagaaaaaggggtggctgttggaggaagggaggagagtaaatgaagagaaagaactggaataaccccttgcagaaaaaaaaaaaaagggaagcaagcttagctgtacaccctgagtcttgcaaaagctgcagccccacccaggagcagggtggtggctggggcgatggtggacgccctgaagatgtcccatggctactgaaggggctgcccagttagggaacagagtggcgggcatggtgtgtagcctatgggtgctgctcctggtgtcttcagttctggctctggaagaggtattgctggacaccaccggagagacatctgagattggctggctcacctacccaccaggggggtgggacgaggtgagtgttctggacgaccagcgacgcctgactcggacctttgaggcatgtcatgtggcaggggcccctccaggcaccgggcaggacaattggttgcagacacactttgtggagcggcgcggggcccagagggcgcacattcgactccacttctctgtgcgggcatgctccagcctgggtgtgagcggcggcacctgccgggagaccttcaccctttactaccgtcaggctgaggagcccgacagccctgacagcgtttcctcctggcacctcaaacgctggaccaaggtggacacaattgcagcagacgagagctttccctcctcctcctcctcctcctcctcttcttcctctgcagcgtgggctgtgggaccccacggggctgggcagcgggctggactgcaactgaacgtcaaagagcggagctttgggcctctcacccaacgcggcttctacgtggccttccaggacacgggggcctgcctggccctggtcgctgtcaggctcttctcctacacctgccctgccgtgctccgatcctttgcttcctttccagagacgcaggccagtggggctgggggggcctccctggtggcagctgtgggcacctgtgtggctcatgcagagccagaggaggatggagtagggggccaggcaggaggcagcccccccaggctgcactgcaacggggagggcaagtggatggtagctgtcgggggctgccgctgccagcctggataccaaccagcacgaggagacaaggcctgccaagcctgcccacgggggctctataagtcttctgctgggaatgctccctgctcaccatgccctgcccgcagtcacgctcccaacccagcagcccccgtttgcccctgcctggagggcttctaccgggccagttccgacccaccagaggccccctgcactggtcctccatcggctccccaggagctttggtttgaggtgcaaggctcagcactcatgctacactggcgcctgcctcgggagctggggggtcgaggggacctgctcttcaatgtcgtgtgcaaggagtgtgaaggccgccaggaacctgccagcggtggtgggggcacttgtcaccgctgcagggatgaggtccacttcgaccctcgccagagaggcctgactgagagccgagtgttagtggggggactccgggcacacgtaccctacatcttagaggtgcaggctgttaatggggtgtctgagctcagccctgaccctcctcaggctgcagccatcaatgtcagcaccagccatgaagtgccctctgctgtccctgtggtgcaccaggtgagccgggcatccaacagcatcacggtgtcctggccgcagcccgaccagaccaatgggaacatcctggactatcagctccgctactatgaccaggcagaagacgaatcccactccttcaccctgaccagcgagaccaacactgccaccgtgacacagctgagccctggccacatctatggtttccaggtgcgggcccggactgctgccggccacggcccctacgggggcaaagtctatttccagacacttcctcaaggggagctgtcttcccagcttccggaaagactctccttggtgatcggctccatcctgggggctttggccttcctcctgctggcagccatcaccgtgctggcggtcgtcttccagcggaagcggcgtgggactggctacacggagcagctgcagcaatacagcagcccaggactcggggtgaagtattacatcgacccctccacctacgaggacccctgtcaggccatccgagaacttgcccgggaagtcgatcctgcttatatcaagattgaggaggtcattgggacaggctcttttggagaagtgcgccagggccgcctgcagccacggggacggagggagcagactgtggccatccaggccctgtgggccgggggcgccgaaagcctgcagatgaccttcctgggccgggccgcagtgctgggtcagttccagcaccccaacatcctgcggctggagggcgtggtcaccaagagccgacccctcatggtgctgacggagttcatggagcttggccccctggacagcttcctcaggcagcgggagggccagttcagcagcctgcagctggtggccatgcagcggggagtggctgctgccatgcagtacctgtccagctttgccttcgtccatcgctcgctgtctgcccacagcgtgctggtgaatagccacttggtgtgcaaggtggcccgtcttggccacagtcctcagggcccaagttgtttgcttcgctgggcagccccagaggtcattgcacatggaaagcatacaacatccagtgatgtctggagctttgggatactcatgtgggaagtgatgagttatggagaacggccttactgggacatgagtgagcaggaggtactaaatgcaatagagcaggagttccggctgcccccgcctccaggctgtcctcctggattacatctacttatgttggacacttggcagaaggaccgtgcccggcggcctcattttgaccagctggtggctgcatttgacaagatgatccgcaagccagataccctgcaggctggcggggacccaggggaaaggccttcccaggcccttctgacccctgtggccctggactttccttgtctggactcaccccaggcctggctttcagccattggactggagtgctaccaggacaacttctccaagtttggcctctgtaccttcagtgatgtggctcagctcagcctagaagacctgcctgccctgggcatcaccctggctggccaccagaagaagctgctgcaccacatccagctccttcagcaacacctgaggcagcagggctcagtggaggtctgagaatgacgatacccgtgactcagccctggacactggtccgagaagggacatgtgggacgtgagccgggctccaacagcctctgtgagagatgccccacaccaaacccaaccctcccgatggctgcattccctggtcctccgcctctccaccagccccctcctcattaaagggaaagaagggaatttgcaaaaaaaaaaaaaaaaaa

SEQ ID NO: 177 - DNA, 4624 bp, Homo sapiens
  ref <308>: DATABASE ACCESSION NUMBER: GenBank No. NM004448
  ref <309>: DATABASE ENTRY DATE: 2004-12-20
ggaggaggtggaggaggagggctgcttgaggaagtataagaatgaagttgtgaagctgagattcccctccattgggaccggagaaaccaggggagccccccgggcagccgcgcgccccttcccacggggccctttactgcgccgcgcgcccggcccccacccctcgcagcaccccgcgccccgcgccctcccagccgggtccagccggagccatggggccggagccgcagtgagcaccatggagctggcggccttgtgccgctgggggctcctcctcgccctcttgccccccggagccgcgagcacccaagtgtgcaccggcacagacatgaagctgcggctccctgccagtcccgagacccacctggacatgctccgccacctctaccagggctgccaggtggtgcagggaaacctggaactcacctacctgcccaccaatgccagcctgtccttcctgcaggatatccaggaggtgcagggctacgtgctcatcgctcacaaccaagtgaggcaggtcccactgcagaggctgcggattgtgcgaggcacccagctctttgaggacaactatgccctggccgtgctagacaatggagacccgctgaacaataccacccctgtcacaggggcctccccaggaggcctgcgggagctgcagcttcgaagcctcacagagatcttgaaaggaggggtcttgatccagcggaacccccagctctgctaccaggacacgattttgtggaaggacatcttccacaagaacaaccagctggctctcacactgatagacaccaaccgctctcgggcctgccacccctgttctccgatgtgtaagggctcccgctgctggggagagagttctgaggattgtcagagcctgacgcgcactgtctgtgccggtggctgtgcccgctgcaaggggccactgcccactgactgctgccatgagcagtgtgctgccggctgcacgggccccaagcactctgactgcctggcctgcctccacttcaaccacagtggcatctgtgagctgcactgcccagccctggtcacctacaacacagacacgtttgagtccatgcccaatcccgagggccggtatacattcggcgccagctgtgtgactgcctgtccctacaactacctttctacggacgtgggatcctgcaccctcgtctgccccctgcacaaccaagaggtgacagcagaggatggaacacagcggtgtgagaagtgcagcaagccctgtgcccgagtgtgctatggtctgggcatggagcacttgcgagaggtgagggcagttaccagtgccaatatccaggagtttgctggctgcaagaagatctttgggagcctggcatttctgccggagagctttgatggggacccagcctccaacactgccccgctccagccagagcagctccaagtgtttgagactctggaagagatcacaggttacctatacatctcagcatggccggacagcctgcctgacctcagcgtcttccagaacctgcaagtaatccggggacgaattctgcacaatggcgcctactcgctgaccctgcaagggctgggcatcagctggctggggctgcgctcactgagggaactgggcagtggactggccctcatccaccataacacccacctctgcttcgtgcacacggtgccctgggaccagctctttcggaacccgcaccaagctctgctccacactgccaaccggccagaggacgagtgtgtgggcgagggcctggcctgccaccagctgtgcgcccgagggcactgctggggtccagggcccacccagtgtgtcaactgcagccagttccttcggggccaggagtgcgtggaggaatgccgagtactgcaggggctccccagggagtatgtgaatgccaggcactgtttgccgtgccaccctgagtgtcagccccagaatggctcagtgacctgttttggaccggaggctgaccagtgtgtggcctgtgcccactataaggaccctcccttctgcgtggcccgctgccccagcggtgtgaaacctgacctctcctacatgcccatctggaagtttccagatgaggagggcgcatgccagccttgccccatcaactgcacccactcctgtgtggacctggatgacaagggctgccccgccgagcagagagccagccctctgacgtccatcatctctgcggtggttggcattctgctggtcgtggtcttgggggtggtctttgggatcctcatcaagcgacggcagcagaagatccggaagtacacgatgcggagactgctgcaggaaacggagctggtggagccgctgacacctagcggagcgatgcccaaccaggcgcagatgcggatcctgaaagagacggagctgaggaaggtgaaggtgcttggatctggcgcttttggcacagtctacaagggcatctggatccctgatggggagaatgtgaaaattccagtggccatcaaagtgttgagggaaaacacatcccccaaagccaacaaagaaatcttagacgaagcatacgtgatggctggtgtgggctccccatatgtctcccgccttctgggcatctgcctgacatccacggtgcagctggtgacacagcttatgccctatggctgcctcttagaccatgtccgggaaaaccgcggacgcctgggctcccaggacctgctgaactggtgtatgcagattgccaaggggatgagctacctggaggatgtgcggctcgtacacagggacttggccgctcggaacgtgctggtcaagagtcccaaccatgtcaaaattacagacttcgggctggctcggctgctggacattgacgagacagagtaccatgcagatgggggcaaggtgcccatcaagtggatggcgctggagtccattctccgccggcggttcacccaccagagtgatgtgtggagttatggtgtgactgtgtgggagctgatgacttttggggccaaaccttacgatgggatcccagcccgggagatccctgacctgctggaaaagggggagcggctgccccagccccccatctgcaccattgatgtctacatgatcatggtcaaatgttggatgattgactctgaatgtcggccaagattccgggagttggtgtctgaattctcccgcatggccagggacccccagcgctttgtggtcatccagaatgaggacttgggcccagccagtcccttggacagcaccttctaccgctcactgctggaggacgatgacatgggggacctggtggatgctgaggagtatctggtaccccagcagggcttcttctgtccagaccctgccccgggcgctgggggcatggtccaccacaggcaccgcagctcatctaccaggagtggcggtggggacctgacactagggctggagccctctgaagaggaggcccccaggtctccactggcaccctccgaaggggctggctccgatgtatttgatggtgacctgggaatgggggcagccaaggggctgcaaagcctccccacacatgaccccagccctctacagcggtacagtgaggaccccacagtacccctgccctctgagactgatggctacgttgcccccctgacctgcagcccccagcctgaatatgtgaaccagccagatgttcggccccagcccccttcgccccgagagggccctctgcctgctgcccgacctgctggtgccactctggaaaggcccaagactctctccccagggaagaatggggtcgtcaaagacgtttttgcctttgggggtgccgtggagaaccccgagtacttgacaccccagggaggagctgcccctcagccccaccctcctcctgccttcagcccagccttcgacaacctctattactgggaccaggacccaccagagcggggggctccacccagcaccttcaaagggacacctacggcagagaacccagagtacctgggtctggacgtgccagtgtgaaccagaaggccaagtccgcagaagccctgatgtgtcctcagggagcagggaaggcctgacttctgctggcatcaagaggtgggagggccctccgaccacttccaggggaacctgccatgccaggaacctgtcctaaggaaccttccttcctgcttgagttcccagatggctggaaggggtccagcctcgttggaagaggaacagcactggggagtctttgtggattctgaggccctgcccaatgagactctagggtccagtggatgccacagcccagcttggccctttccttccagatcctgggtactgaaagccttagggaagctggcctgagaggggaagcggccctaagggagtgtctaagaacaaaagcgacccattcagagactgtccctgaaacctagtactgccccccatgaggaaggaacagcaatggtgtcagtatccaggctttgtacagagtgcttttctgtttagtttttactttttttgttttgtttttttaaagatgaaataaagacccagggggagaatgggtgttgtatggggaggcaagtgtggggggtccttctccacacccactttgtccatttgcaaatatattttggaaaacagcta

SEQ ID NO: 178 - DNA, 5511 bp, Homo sapiens
  ref <308>: DATABASE ACCESSION NUMBER: GenBank No. NM001982
  ref <309>: DATABASE ENTRY DATE: 2004-12-20
acacacacacacccctcccctgccatccctccccggactccggctccggctccgattgcaatttgcaacctccgctgccgtcgccgcagcagccaccaattcgccagcggttcaggtggctcttgcctcgatgtcctagcctaggggcccccgggccggacttggctgggctcccttcaccctctgcggagtcatgagggcgaacgacgctctgcaggtgctgggcttgcttttcagcctggcccggggctccgaggtgggcaactctcaggcagtgtgtcctgggactctgaatggcctgagtgtgaccggcgatgctgagaaccaataccagacactgtacaagctctacgagaggtgtgaggtggtgatggggaaccttgagattgtgctcacgggacacaatgccgacctctccttcctgcagtggattcgagaagtgacaggctatgtcctcgtggccatgaatgaattctctactctaccattgcccaacctccgcgtggtgcgagggacccaggtctacgatgggaagtttgccatcttcgtcatgttgaactataacaccaactccagccacgctctgcgccagctccgcttgactcagctcaccgagattctgtcagggggtgtttatattgagaagaacgataagctttgtcacatggacacaattgactggagggacatcgtgagggaccgagatgctgagatagtggtgaaggacaatggcagaagctgtcccccctgtcatgaggtttgcaaggggcgatgctggggtcctggatcagaagactgccagacattgaccaagaccatctgtgctcctcagtgtaatggtcactgctttgggcccaaccccaaccagtgctgccatgatgagtgtgccgggggctgctcaggccctcaggacacagactgctttgcctgccggcacttcaatgacagtggagcctgtgtacctcgctgtccacagcctcttgtctacaacaagctaactttccagctggaacccaatccccacaccaagtatcagtatggaggagtttgtgtagccagctgtccccataactttgtggtggatcaaacatcctgtgtcagggcctgtcctcctgacaagatggaagtagataaaaatgggctcaagatgtgtgagccttgtgggggactatgtcccaaagcctgtgagggaacaggctctgggagccgcttccagactgtggactcgagcaacattgatggatttgtgaactgcaccaagatcctgggcaacctggactttctgatcaccggcctcaatggagacccctggcacaagatccctgccctggacccagagaagctcaatgtcttccggacagtacgggagatcacaggttacctgaacatccagtcctggccgccccacatgcacaacttcagtgttttttccaatttgacaaccattggaggcagaagcctctacaaccggggcttctcattgttgatcatgaagaacttgaatgtcacatctctgggcttccgatccctgaaggaaattagtgctgggcgtatctatataagtgccaataggcagctctgctaccaccactctttgaactggaccaaggtgcttcgggggcctacggaagagcgactagacatcaagcataatcggccgcgcagagactgcgtggcagagggcaaagtgtgtgacccactgtgctcctctgggggatgctggggcccaggccctggtcagtgcttgtcctgtcgaaattatagccgaggaggtgtctgtgtgacccactgcaactttctgaatggggagcctcgagaatttgcccatgaggccgaatgcttctcctgccacccggaatgccaacccatggagggcactgccacatgcaatggctcgggctctgatacttgtgctcaatgtgcccattttcgagatgggccccactgtgtgagcagctgcccccatggagtcctaggtgccaagggcccaatctacaagtacccagatgttcagaatgaatgtcggccctgccatgagaactgcacccaggggtgtaaaggaccagagcttcaagactgtttaggacaaacactggtgctgatcggcaaaacccatctgacaatggctttgacagtgatagcaggattggtagtgattttcatgatgctgggcggcacttttctctactggcgtgggcgccggattcagaataaaagggctatgaggcgatacttggaacggggtgagagcatagagcctctggaccccagtgagaaggctaacaaagtcttggccagaatcttcaaagagacagagctaaggaagcttaaagtgcttggctcgggtgtctttggaactgtgcacaaaggagtgtggatccctgagggtgaatcaatcaagattccagtctgcattaaagtcattgaggacaagagtggacggcagagttttcaagctgtgacagatcatatgctggccattggcagcctggaccatgcccacattgtaaggctgctgggactatgcccagggtcatctctgcagcttgtcactcaatatttgcctctgggttctctgctggatcatgtgagacaacaccggggggcactggggccacagctgctgctcaactggggagtacaaattgccaagggaatgtactaccttgaggaacatggtatggtgcatagaaacctggctgcccgaaacgtgctactcaagtcacccagtcaggttcaggtggcagattttggtgtggctgacctgctgcctcctgatgataagcagctgctatacagtgaggccaagactccaattaagtggatggcccttgagagtatccactttgggaaatacacacaccagagtgatgtctggagctatggtgtgacagtttgggagttgatgaccttcggggcagagccctatgcagggctacgattggctgaagtaccagacctgctagagaagggggagcggttggcacagccccagatctgcacaattgatgtctacatggtgatggtcaagtgttggatgattgatgagaacattcgcccaacctttaaagaactagccaatgagttcaccaggatggcccgagacccaccacggtatctggtcataaagagagagagtgggcctggaatagcccctgggccagagccccatggtctgacaaacaagaagctagaggaagtagagctggagccagaactagacctagacctagacttggaagcagaggaggacaacctggcaaccaccacactgggctccgccctcagcctaccagttggaacacttaatcggccacgtgggagccagagccttttaagtccatcatctggatacatgcccatgaaccagggtaatcttggggagtcttgccaggagtctgcagtttctgggagcagtgaacggtgcccccgtccagtctctctacacccaatgccacggggatgcctggcatcagagtcatcagaggggcatgtaacaggctctgaggctgagctccaggagaaagtgtcaatgtgtaggagccggagcaggagccggagcccacggccacgcggagatagcgcctaccattcccagcgccacagtctgctgactcctgttaccccactctccccacccgggttagaggaagaggatgtcaacggttatgtcatgccagatacacacctcaaaggtactccctcctcccgggaaggcaccctttcttcagtgggtctcagttctgtcctgggtactgaagaagaagatgaagatgaggagtatgaatacatgaaccggaggagaaggcacagtccacctcatccccctaggccaagttcccttgaggagctgggttatgagtacatggatgtggggtcagacctcagtgcctctctgggcagcacacagagttgcccactccaccctgtacccatcatgcccactgcaggcacaactccagatgaagactatgaatatatgaatcggcaacgagatggaggtggtcctgggggtgattatgcagccatgggggcctgcccagcatctgagcaagggtatgaagagatgagagcttttcaggggcctggacatcaggccccccatgtccattatgcccgcctaaaaactctacgtagcttagaggctacagactctgcctttgataaccctgattactggcatagcaggcttttccccaaggctaatgcccagagaacgtaactcctgctccctgtggcactcagggagcatttaatggcagctagtgcctttagagggtaccgtcttctccctattccctctctctcccaggtcccagccccttttccccagtcccagacaattccattcaatctttggaggcttttaaacattttgacacaaaattcttatggtatgtagccagctgtgcactttcttctctttcccaaccccaggaaaggttttccttattttgtgtgctttcccagtcccattcctcagcttcttcacaggcactcctggagatatgaaggattactctccatatcccttcctctcaggctcttgactacttggaactaggctcttatgtgtgcctttgtttcccatcagactgtcaagaagaggaaagggaggaaacctagcagaggaaagtgtaattttggtttatgactcttaaccccctagaaagacagaagcttaaaatctgtgaagaaagaggttaggagtagatattgattactatcataattcagcacttaactatgagccaggcatcatactaaacttcacctacattatctcacttagtcctttatcatccttaaaacaattctgtgacatacatattatctcattttacacaaagggaagtcgggcatggtggctcatgcctgtaatctcagcactttgggaggctgaggcagaaggattacctgaggcaaggagtttgagaccagcttagccaacatagtaagacccccatctctttaaaaaaaaaaaaaaaaaaaaaaaaaaaactttagaactgggtgcagtggctcatgcctgtaatcccagccagcactttgggaggctgagatgggaagatcacttgagcccagaattagagataagcctatggaaacatagcaagacactgtctctacaggggaaaaaaaaaaaagaaactgagccttaaagagatgaaataaattaagcagtagatccaggatgcaaaatcctcccaattcctgtgcatgtgctcttattgtaaggtgccaagaaaaactgatttaagttacagcccttgtttaaggggcactgtttcttgtttttgcactgaatcaagtctaaccccaacagccacatcctcctatacctagacatctcatctcaggaagtggtggtgggggtagtcagaaggaaaaataactggacatctttgtgtaaaccataatccacatgtgccgtaaatgatcttcactccttatccgagggcaaattcacaaggatccccaagatccacttttagaagccattctcatcca

SEQ ID NO: 179 - DNA, 4587 bp, Homo sapiens
  ref <308>: DATABASE ACCESSION NUMBER: GenBank No. NM000141
  ref <309>: DATABASE ENTRY DATE: 2004-12-20
gagcgggcgagggagcgcgcgcggccgccacaaagctcgggcgccgcggggctgcatgcggcgtacctggcccggcgcggcgactgctctccgggctggcgggggccggccgcgagccccgggggccccgaggccgcagcttgcctgcgcgctctgagccttcgcaactcgcgagcaaagtttggtggaggcaacgccaagcctgagtcctttcttcctctcgttccccaaatccgagggcagcccgcgggcgtcatgcccgcgctcctccgcagcctggggtacgcgtgaagcccgggaggcttggcgccggcgaagacccaaggaccactcttctgcgtttggagttgctccccacaaccccgggctcgtcgctttctccatcccgacccacgcggggcgcggggacaacacaggtcgcggaggagcgttgccattcaagtgactgcagcagcagcggcagcgcctcggttcctgagcccaccgcaggctgaaggcattgcgcgtagtccatgcccgtagaggaagtgtgcagatgggattaacgtccacatggagatatggaagaggaccggggattggtaccgtaaccatggtcagctggggtcgtttcatctgcctggtcgtggtcaccatggcaaccttgtccctggcccggccctccttcagtttagttgaggataccacattagagccagaagagccaccaaccaaataccaaatctctcaaccagaagtgtacgtggctgcgccaggggagtcgctagaggtgcgctgcctgttgaaagatgccgccgtgatcagttggactaaggatggggtgcacttggggcccaacaataggacagtgcttattggggagtacttgcagataaagggcgccacgcctagagactccggcctctatgcttgtactgccagtaggactgtagacagtgaaacttggtacttcatggtgaatgtcacagatgccatctcatccggagatgatgaggatgacaccgatggtgcggaagattttgtcagtgagaacagtaacaacaagagagcaccatactggaccaacacagaaaagatggaaaagcggctccatgctgtgcctgcggccaacactgtcaagtttcgctgcccagccggggggaacccaatgccaaccatgcggtggctgaaaaacgggaaggagtttaagcaggagcatcgcattggaggctacaaggtacgaaaccagcactggagcctcattatggaaagtgtggtcccatctgacaagggaaattatacctgtgtggtggagaatgaatacgggtccatcaatcacacgtaccacctggatgttgtggagcgatcgcctcaccggcccatcctccaagccggactgccggcaaatgcctccacagtggtcggaggagacgtagagtttgtctgcaaggtttacagtgatgcccagccccacatccagtggatcaagcacgtggaaaagaacggcagtaaatacgggcccgacgggctgccctacctcaaggttctcaaggccgccggtgttaacaccacggacaaagagattgaggttctctatattcggaatgtaacttttgaggacgctggggaatatacgtgcttggcgggtaattctattgggatatcctttcactctgcatggttgacagttctgccagcgcctggaagagaaaaggagattacagcttccccagactacctggagatagccatttactgcataggggtcttcttaatcgcctgtatggtggtaacagtcatcctgtgccgaatgaagaacacgaccaagaagccagacttcagcagccagccggctgtgcacaagctgaccaaacgtatccccctgcggagacaggtaacagtttcggctgagtccagctcctccatgaactccaacaccccgctggtgaggataacaacacgcctctcttcaacggcagacacccccatgctggcaggggtctccgagtatgaacttccagaggacccaaaatgggagtttccaagagataagctgacactgggcaagcccctgggagaaggttgctttgggcaagtggtcatggcggaagcagtgggaattgacaaagacaagcccaaggaggcggtcaccgtggccgtgaagatgttgaaagatgatgccacagagaaagacctttctgatctggtgtcagagatggagatgatgaagatgattgggaaacacaagaatatcataaatcttcttggagcctgcacacaggatgggcctctctatgtcatagttgagtatgcctctaaaggcaacctccgagaatacctccgagcccggaggccacccgggatggagtactcctatgacattaaccgtgttcctgaggagcagatgaccttcaaggacttggtgtcatgcacctaccagctggccagaggcatggagtacttggcttcccaaaaatgtattcatcgagatttagcagccagaaatgttttggtaacagaaaacaatgtgatgaaaatagcagactttggactcgccagagatatcaacaatatagactattacaaaaagaccaccaatgggcggcttccagtcaagtggatggctccagaagccctgtttgatagagtatacactcatcagagtgatgtctggtccttcggggtgttaatgtgggagatcttcactttagggggctcgccctacccagggattcccgtggaggaactttttaagctgctgaaggaaggacacagaatggataagccagccaactgcaccaacgaactgtacatgatgatgagggactgttggcatgcagtgccctcccagagaccaacgttcaagcagttggtagaagacttggatcgaattctcactctcacaaccaatgaggaatacttggacctcagccaacctctcgaacagtattcacctagttaccctgacacaagaagttcttgttcttcaggagatgattctgttttttctccagaccccatgccttacgaaccatgccttcctcagtatccacacataaacggcagtgttaaaacatgaatgactgtgtctgcctgtccccaaacaggacagcactgggaacctagctacactgagcagggagaccatgcctcccagagcttgttgtctccacttgtatatatggatcagaggagtaaataattggaaaagtaatcagcatatgtgtaaagatttatacagttgaaaacttgtaatcttccccaggaggagaagaaggtttctggagcagtggactgccacaagccaccatgtaacccctctcacctgccgtgcgtactggctgtggaccagtaggactcaaggtggacgtgcgttctgccttccttgttaattttgtaataattggagaagatttatgtcagcacacacttacagagcacaaatgcagtatataggtgctggatgtatgtaaatatattcaaattatgtataaatatatattatatatttacaaggagttattttttgtattgattttaaatggatgtcccaatgcacctagaaaattggtctctctttttttaatagctatttgctaaatgctgttcttacacataatttcttaattttcaccgagcagaggtggaaaaatacttttgctttcagggaaaatggtataacgttaatttattaataaattggtaatatacaaaacaattaatcatttatagttttttttgtaatttaagtggcatttctatgcaggcagcacagcagactagttaatctattgcttggacttaactagttatcagatcctttgaaaagagaatatttacaatatatgactaatttggggaaaatgaagttttgatttatttgtgtttaaatgctgctgtcagacgattgttcttagacctcctaaatgccccatattaaaagaactcattcataggaaggtgtttcattttggtgtgcaaccctgtcattacgtcaacgcaacgtctaactggacttcccaagataaatggtaccagcgtcctcttaaaagatgccttaatccattccttgaggacagaccttagttgaaatgatagcagaatgtgcttctctctggcagctggccttctgcttctgagttgcacattaatcagattagcctgattctcttcagtgaattttgataatggcttccagactctttgcgttggagacgcctgttaggatcttcaagtcccatcatagaaaattgaaacacagagttgttctgctgatagttttggggatacgtccatctttttaagggattgctttcatctaattctggcaggacctcaccaaaagatccagcctcatacctacatcagacaaaatatcgccgttgttccttctgtactaaagtattgtgttttgctttggaaacacccactcactttgcaatagccgtgcaagatgaatgcagattacactgatcttatgtgttacaaaattggagaaagtatttaataaaacctgttaatttttatactgacaataaaaatgtttctacagatattaatgttaacaagacaaaataaatgtcacgcaacttaaaaaaaaaaaaaaaa

SEQ ID NO: 180 - DNA, 4093 bp, Homo sapiens
  ref <308>: DATABASE ACCESSION NUMBER: GenBank No. NM000142
  ref <309>: DATABASE ENTRY DATE: 2004-12-20
cgcgcgctgcctgaggacgccgcggcccccgcccccgccatgggcgcccctgcctgcgccctcgcgctctgcgtggccgtggccatcgtggccggcgcctcctcggagtccttggggacggagcagcgcgtcgtggggcgagcggcagaagtcccgggcccagagcccggccagcaggagcagttggtcttcggcagcggggatgctgtggagctgagctgtcccccgcccgggggtggtcccatggggcccactgtctgggtcaaggatggcacagggctggtgccctcggagcgtgtcctggtggggccccagcggctgcaggtgctgaatgcctcccacgaggactccggggcctacagctgccggcagcggctcacgcagcgcgtactgtgccacttcagtgtgcgggtgacagacgctccatcctcgggagatgacgaagacggggaggacgaggctgaggacacaggtgtggacacaggggccccttactggacacggcccgagcggatggacaagaagctgctggccgtgccggccgccaacaccgtccgcttccgctgcccagccgctggcaaccccactccctccatctcctggctgaagaacggcagggagttccgcggcgagcaccgcattggaggcatcaagctgcggcatcagcagtggagcctggtcatggaaagcgtggtgccctcggaccgcggcaactacacctgcgtcgtggagaacaagtttggcagcatccggcagacgtacacgctggacgtgctggagcgctccccgcaccggcccatcctgcaggcggggctgccggccaaccagacggcggtgctgggcagcgacgtggagttccactgcaaggtgtacagtgacgcacagccccacatccagtggctcaagcacgtggaggtgaacggcagcaaggtgggcccggacggcacaccctacgttaccgtgctcaagacggcgggcgctaacaccaccgacaaggagctagaggttctctccttgcacaacgtcacctttgaggacgccggggagtacacctgcctggcgggcaattctattgggttttctcatcactctgcgtggctggtggtgctgccagccgaggaggagctggtggaggctgacgaggcgggcagtgtgtatgcaggcatcctcagctacggggtgggcttcttcctgttcatcctggtggtggcggctgtgacgctctgccgcctgcgcagcccccccaagaaaggcctgggctcccccaccgtgcacaagatctcccgcttcccgctcaagcgacaggtgtccctggagtccaacgcgtccatgagctccaacacaccactggtgcgcatcgcaaggctgtcctcaggggagggccccacgctggccaatgtctccgagctcgagctgcctgccgaccccaaatgggagctgtctcgggcccggctgaccctgggcaagccccttggggagggctgcttcggccaggtggtcatggcggaggccatcggcattgacaaggaccgggccgccaagcctgtcaccgtagccgtgaagatgctgaaagacgatgccactgacaaggacctgtcggacctggtgtctgagatggagatgatgaagatgatcgggaaacacaaaaacatcatcaacctgctgggcgcctgcacgcagggcgggcccctgtacgtgctggtggagtacgcggccaagggtaacctgcgggagtttctgcgggcgcggcggcccccgggcctggactactccttcgacacctgcaagccgcccgaggagcagctcaccttcaaggacctggtgtcctgtgcctaccaggtggcccggggcatggagtacttggcctcccagaagtgcatccacagggacctggctgcccgcaatgtgctggtgaccgaggacaacgtgatgaagatcgcagacttcgggctggcccgggacgtgcacaacctcgactactacaagaagacaaccaacggccggctgcccgtgaagtggatggcgcctgaggccttgtttgaccgagtctacactcaccagagtgacgtctggtcctttggggtcctgctctgggagatcttcacgctggggggctccccgtaccccggcatccctgtggaggagctcttcaagctgctgaaggagggccaccgcatggacaagcccgccaactgcacacacgacctgtacatgatcatgcgggagtgctggcatgccgcgccctcccagaggcccaccttcaagcagctggtggaggacctggaccgtgtccttaccgtgacgtccaccgacgagtacctggacctgtcggcgcctttcgagcagtactccccgggtggccaggacacccccagctccagctcctcaggggacgactccgtgtttgcccacgacctgctgcccccggccccacccagcagtgggggctcgcggacgtgaagggccactggtccccaacaatgtgaggggtccctagcagccctccctgctgctggtgcacagccactccccggcatgagactcagtgcagatggagagacagctacacagagctttggtctgtgtgtgtgtgtgtgcgtgtgtgtgtgtgtgtgcacatccgcgtgtgcctgtgtgcgtgcgcatcttgcctccaggtgcagaggtaccctgggtgtccccgctgctgtgcaacggtctcctgactggtgctgcagcaccgaggggcctttgttctggggggacccagtgcagaatgtaagtgggcccacccggtgggaccccgtggggcagggagctgggcccgacatggctcggcctctgcctttgcaccacgggacatcacagggtgcgctcggcccctcccacacccaaagctgagcctgcagggaagccccacatgtccagcaccttgtgcctggggtgttagtggcaccgcctccccacctccaggctttcccacttcccaccctgcccctcagagactgaaattacgggtacctgaagatgggagcctttaccttttatgcaaaaggtttattccggaaactagtgtacatttctataaatagatgctgtgtatatggtatatatacatatatatatataacatatatggaagaggaaaaggctggtacaacggaggcctgcgaccctgggggcacaggaggcaggcatggccctgggcggggcgtgggggggcgtggagggaggccccaggggtctcacccatgcaagcagaggaccagggctttttctggcaccgcagttttgttttaaaactggacctgtatatttgtaaagctatttatgggcccctggcactcttgttcccacaccccaacacttccagcatttagctggccacatggcggagagttttaatttttaacttattgacaaccgagaaggtttatcccgccgatagagggacggccaagaatgtacgtccagcctgccccggagctggaggatcccctccaagcctaaaaggttgttaatagttggaggtgattccagtgaagatattttatttgctttgtcctttttcaggagaattagatttctataggatttttctttaggagatttattttttggacttcaaagcaagctggtattttcatacaaattcttctaattgctgtgtgtcccaggcagggagacggtttccagggaggggccggccctgtgtgcaggttccgatgttattagatgttacaagtttatatatatctatatatataatttattgagtttttacaagatgtatttgttgtagacttaacacttcttacgcaatgcttctagagttttatagcctggactgctacctttcaaagcttggagggaagccgtgaattcagttggttcgttctgtactgttactgggccctgagtctgggcagctgtcccttgcttgcctgcagggccatggctcagggtggtctcttcttggggcccagtgcatggtggccagaggtgtcacccaaaccggcaggtgcgattttgttaacccagcgacgaactttccgaaaaataaagacacctggttgctaacctgaaaaaaaaaaaaaaaaaaaaaaaaaaaaaa

SEQ ID NO: 181 - DNA, 3475 bp, Homo sapiens
  ref <308>: DATABASE ACCESSION NUMBER: GenBank No. NM004119
  ref <309>: DATABASE ENTRY DATE: 2005-01-22
cgaggcggcatccgagggctgggccggcgccctgggggaccccgggctccggaggccatgccggcgttggcgcgcgacgcgggcaccgtgccgctgctcgttgttttttctgcaatgatatttgggactattacaaatcaagatctgcctgtgatcaagtgtgttttaatcaatcataagaacaatgattcatcagtggggaagtcatcatcatatcccatggtatcagaatccccggaagacctcgggtgtgcgttgagaccccagagctcagggacagtgtacgaagctgccgctgtggaagtggatgtatctgcttccatcacactgcaagtgctggtcgatgccccagggaacatttcctgtctctgggtctttaagcacagctccctgaattgccagccacattttgatttacaaaacagaggagttgtttccatggtcattttgaaaatgacagaaacccaagctggagaatacctactttttattcagagtgaagctaccaattacacaatattgtttacagtgagtataagaaataccctgctttacacattaagaagaccttactttagaaaaatggaaaaccaggacgccctggtctgcatatctgagagcgttccagagccgatcgtggaatgggtgctttgcgattcacagggggaaagctgtaaagaagaaagtccagctgttgttaaaaaggaggaaaaagtgcttcatgaattatttgggacggacataaggtgctgtgccagaaatgaactgggcagggaatgcaccaggctgttcacaatagatctaaatcaaactcctcagaccacattgccacaattatttcttaaagtaggggaacccttatggataaggtgcaaagctgttcatgtgaaccatggattcgggctcacctgggaattagaaaacaaagcactcgaggagggcaactactttgagatgagtacctattcaacaaacagaactatgatacggattctgtttgcttttgtatcatcagtggcaagaaacgacaccggatactacacttgttcctcttcaaagcatcccagtcaatcagctttggttaccatcgtaggaaagggatttataaatgctaccaattcaagtgaagattatgaaattgaccaatatgaagagttttgtttttctgtcaggtttaaagcctacccacaaatcagatgtacgtggaccttctctcgaaaatcatttccttgtgagcaaaagggtcttgataacggatacagcatatccaagttttgcaatcataagcaccagccaggagaatatatattccatgcagaaaatgatgatgcccaatttaccaaaatgttcacgctgaatataagaaggaaacctcaagtgctcgcagaagcatcggcaagtcaggcgtcctgtttctcggatggatacccattaccatcttggacctggaagaagtgttcagacaagtctcccaactgcacagaagagatcacagaaggagtctggaatagaaaggctaacagaaaagtgtttggacagtgggtgtcgagcagtactctaaacatgagtgaagccataaaagggttcctggtcaagtgctgtgcatacaattcccttggcacatcttgtgagacgatccttttaaactctccaggccccttccctttcatccaagacaacatctcattctatgcaacaattggtgtttgtctcctcttcattgtcgttttaaccctgctaatttgtcacaagtacaaaaagcaatttaggtatgaaagccagctacagatggtacaggtgaccggctcctcagataatgagtacttctacgttgatttcagagaatatgaatatgatctcaaatgggagtttccaagagaaaatttagagtttgggaaggtactaggatcaggtgcttttggaaaagtgatgaacgcaacagcttatggaattagcaaaacaggagtctcaatccaggttgccgtcaaaatgctgaaagaaaaagcagacagctctgaaagagaggcactcatgtcagaactcaagatgatgacccagctgggaagccacgagaatattgtgaacctgctgggggcgtgcacactgtcaggaccaatttacttgatttttgaatactgttgctatggtgatcttctcaactatctaagaagtaaaagagaaaaatttcacaggacttggacagagattttcaaggaacacaatttcagtttttaccccactttccaatcacatccaaattccagcatgcctggttcaagagaagttcagatacacccggactcggatcaaatctcagggcttcatgggaattcatttcactctgaagatgaaattgaatatgaaaaccaaaaaaggctggaagaagaggaggacttgaatgtgcttacatttgaagatcttctttgctttgcatatcaagttgccaaaggaatggaatttctggaatttaagtcgtgtgttcacagagacctggccgccaggaacgtgcttgtcacccacgggaaagtggtgaagatatgtgactttggattggctcgagatatcatgagtgattccaactatgttgtcaggggcaatgcccgtctgcctgtaaaatggatggcccccgaaagcctgtttgaaggcatctacaccattaagagtgatgtctggtcatatggaatattactgtgggaaatcttctcacttggtgtgaatccttaccctggcattccggttgatgctaacttctacaaactgattcaaaatggatttaaaatggatcagccattttatgctacagaagaaatatacattataatgcaatcctgctgggcttttgactcaaggaaacggccatccttccctaatttgacttcgtttttaggatgtcagctggcagatgcagaagaagcgatgtatcagaatgtggatggccgtgtttcggaatgtcctcacacctaccaaaacaggcgacctttcagcagagagatggatttggggctactctctccgcaggctcaggtcgaagattcgtagaggaacaatttagttttaaggacttcatccctccacctatccctaacaggctgtagattaccaaaacaagattaatttcatcactaaaagaaaatctattatcaactgctgcttcaccagacttttctctagaagccgtctgcgtttactcttgttttcaaagggacttttgtaaaatcaaatcatcctgtcacaaggcaggaggagctgataatgaactttattggagcattgatctgcatccaaggccttctcaggccggcttgagtgaattgtgtacctgaagtacagtatattcttgtaaatacataaaacaaaagcattttgctaaggagaagctaatatgattttttaagtctatgttttaaaataatatgtaaatttttcagctatttagtgatatattttatgggtgggaataaaatttctactacag

SEQ ID NO: 182 - DNA, 6641 bp, Homo sapiens
  ref <308>: DATABASE ACCESSION NUMBER: GenBank No. NM000245
  ref <309>: DATABASE ENTRY DATE: 2004-10-28
gccctcgccgcccgcggcgccccgagcgctttgtgagcagatgcggagccgagtggagggcgcgagccagatgcggggcgacagctgacttgctgagaggaggcggggaggcgcggagcgcgcgtgtggtccttgcgccgctgacttctccactggttcctgggcaccgaaagataaacctctcataatgaaggcccccgctgtgcttgcacctggcatcctcgtgctcctgtttaccttggtgcagaggagcaatggggagtgtaaagaggcactagcaaagtccgagatgaatgtgaatatgaagtatcagcttcccaacttcaccgcggaaacacccatccagaatgtcattctacatgagcatcacattttccttggtgccactaactacatttatgttttaaatgaggaagaccttcagaaggttgctgagtacaagactgggcctgtgctggaacacccagattgtttcccatgtcaggactgcagcagcaaagccaatttatcaggaggtgtttggaaagataacatcaacatggctctagttgtcgacacctactatgatgatcaactcattagctgtggcagcgtcaacagagggacctgccagcgacatgtctttccccacaatcatactgctgacatacagtcggaggttcactgcatattctccccacagatagaagagcccagccagtgtcctgactgtgtggtgagcgccctgggagccaaagtcctttcatctgtaaaggaccggttcatcaacttctttgtaggcaataccataaattcttcttatttcccagatcatccattgcattcgatatcagtgagaaggctaaaggaaacgaaagatggttttatgtttttgacggaccagtcctacattgatgttttacctgagttcagagattcttaccccattaagtatgtccatgcctttgaaagcaacaattttatttacttcttgacggtccaaagggaaactctagatgctcagacttttcacacaagaataatcaggttctgttccataaactctggattgcattcctacatggaaatgcctctggagtgtattctcacagaaaagagaaaaaagagatccacaaagaaggaagtgtttaatatacttcaggctgcgtatgtcagcaagcctggggcccagcttgctagacaaataggagccagcctgaatgatgacattcttttcggggtgttcgcacaaagcaagccagattctgccgaaccaatggatcgatctgccatgtgtgcattccctatcaaatatgtcaacgacttcttcaacaagatcgtcaacaaaaacaatgtgagatgtctccagcatttttacggacccaatcatgagcactgctttaataggacacttctgagaaattcatcaggctgtgaagcgcgccgtgatgaatatcgaacagagtttaccacagctttgcagcgcgttgacttattcatgggtcaattcagcgaagtcctcttaacatctatatccaccttcattaaaggagacctcaccatagctaatcttgggacatcagagggtcgcttcatgcaggttgtggtttctcgatcaggaccatcaacccctcatgtgaattttctcctggactcccatccagtgtctccagaagtgattgtggagcatacattaaaccaaaatggctacacactggttatcactgggaagaagatcacgaagatcccattgaatggcttgggctgcagacatttccagtcctgcagtcaatgcctctctgccccaccctttgttcagtgtggctggtgccacgacaaatgtgtgcgatcggaggaatgcctgagcgggacatggactcaacagatctgtctgcctgcaatctacaaggttttcccaaatagtgcaccccttgaaggagggacaaggctgaccatatgtggctgggactttggatttcggaggaataataaatttgatttaaagaaaactagagttctccttggaaatgagagctgcaccttgactttaagtgagagcacgatgaatacattgaaatgcacagttggtcctgccatgaataagcatttcaatatgtccataattatttcaaatggccacgggacaacacaatacagtacattctcctatgtggatcctgtaataacaagtatttcgccgaaatacggtcctatggctggtggcactttacttactttaactggaaattacctaaacagtgggaattctagacacatttcaattggtggaaaaacatgtactttaaaaagtgtgtcaaacagtattcttgaatgttataccccagcccaaaccatttcaactgagtttgctgttaaattgaaaattgacttagccaaccgagagacaagcatcttcagttaccgtgaagatcccattgtctatgaaattcatccaaccaaatcttttattagtggtgggagcacaataacaggtgttgggaaaaacctgaattcagttagtgtcccgagaatggtcataaatgtgcatgaagcaggaaggaactttacagtggcatgtcaacatcgctctaattcagagataatctgttgtaccactccttccctgcaacagctgaatctgcaactccccctgaaaaccaaagcctttttcatgttagatgggatcctttccaaatactttgatctcatttatgtacataatcctgtgtttaagccttttgaaaagccagtgatgatctcaatgggcaatgaaaatgtactggaaattaagggaaatgatattgaccctgaagcagttaaaggtgaagtgttaaaagttggaaataagagctgtgagaatatacacttacattctgaagccgttttatgcacggtccccaatgacctgctgaaattgaacagcgagctaaatatagagtggaagcaagcaatttcttcaaccgtccttggaaaagtaatagttcaaccagatcagaatttcacaggattgattgctggtgttgtctcaatatcaacagcactgttattactacttgggtttttcctgtggctgaaaaagagaaagcaaattaaagatctgggcagtgaattagttcgctacgatgcaagagtacacactcctcatttggataggcttgtaagtgcccgaagtgtaagcccaactacagaaatggtttcaaatgaatctgtagactaccgagctacttttccagaagatcagtttcctaattcatctcagaacggttcatgccgacaagtgcagtatcctctgacagacatgtcccccatcctaactagtggggactctgatatatccagtccattactgcaaaatactgtccacattgacctcagtgctctaaatccagagctggtccaggcagtgcagcatgtagtgattgggcccagtagcctgattgtgcatttcaatgaagtcataggaagagggcattttggttgtgtatatcatgggactttgttggacaatgatggcaagaaaattcactgtgctgtgaaatccttgaacagaatcactgacataggagaagtttcccaatttctgaccgagggaatcatcatgaaagattttagtcatcccaatgtcctctcgctcctgggaatctgcctgcgaagtgaagggtctccgctggtggtcctaccatacatgaaacatggagatcttcgaaatttcattcgaaatgagactcataatccaactgtaaaagatcttattggctttggtcttcaagtagccaaaggcatgaaatatcttgcaagcaaaaagtttgtccacagagacttggctgcaagaaactgtatgctggatgaaaaattcacagtcaaggttgctgattttggtcttgccagagacatgtatgataaagaatactatagtgtacacaacaaaacaggtgcaaagctgccagtgaagtggatggctttggaaagtctgcaaactcaaaagtttaccaccaagtcagatgtgtggtcctttggcgtgctcctctgggagctgatgacaagaggagccccaccttatcctgacgtaaacacctttgatataactgtttacttgttgcaagggagaagactcctacaacccgaatactgcccagaccccttatatgaagtaatgctaaaatgctggcaccctaaagccgaaatgcgcccatccttttctgaactggtgtcccggatatcagcgatcttctctactttcattggggagcactatgtccatgtgaacgctacttatgtgaacgtaaaatgtgtcgctccgtatccttctctgttgtcatcagaagataacgctgatgatgaggtggacacacgaccagcctccttctgggagacatcatagtgctagtactatgtcaaagcaacagtccacactttgtccaatggttttttcactgcctgacctttaaaaggccatcgatattctttgctcttgccaaaattgcactattataggacttgtattgttatttaaattactggattctaaggaatttcttatctgacagagcatcagaaccagaggcttggtcccacaggccacggaccaatggcctgcagccgtgacaacactcctgtcatattggagtccaaaacttgaattctgggttgaattttttaaaaatcaggtaccacttgatttcatatgggaaattgaagcaggaaatattgagggcttcttgatcacagaaaactcagaagagatagtaatgctcaggacaggagcggcagccccagaacaggccactcatttagaattctagtgtttcaaaacacttttgtgtgttgtatggtcaataacatttttcattactgatggtgtcattcacccattaggtaaacattcccttttaaatgtttgtttgttttttgagacaggatctcactctgttgccagggctgtagtgcagtggtgtgatcatagctcactgcaacctccacctcccaggctcaagcctcccgaatagctgggactacaggcgcacaccaccatccccggctaatttttgtattttttgtagagacggggttttgccatgttgccaaggctggtttcaaactcctggactcaagaaatccacccacctcagcctcccaaagtgctaggattacaggcatgagccactgcgcccagcccttataaatttttgtatagacattcctttggttggaagaatatttataggcaatacagtcaaagtttcaaaatagcatcacacaaaacatgtttataaatgaacaggatgtaatgtacatagatgacattaagaaaatttgtatgaaataatttagtcatcatgaaatatttagttgtcatataaaaacccactgtttgagaatgatgctactctgatctaatgaatgtgaacatgtagatgttttgtgtgtatttttttaaatgaaaactcaaaataagacaagtaatttgttgataaatatttttaaagataactcagcatgtttgtaaagcaggatacattttactaaaaggttcattggttccaatcacagctcataggtagagcaaagaaagggtggatggattgaaaagattagcctctgtctcggtggcaggttcccacctcgcaagcaattggaaacaaaacttttggggagttttattttgcattagggtgtgttttatgttaagcaaaacatactttagaaacaaatgaaaaaggcaattgaaaatcccagctatttcacctagatggaatagccaccctgagcagaactttgtgatgcttcattctgtggaattttgtgcttgctactgtatagtgcatgtggtgtaggttactctaactggttttgtcgacgtaaacatttaaagtgttatattttttataaaaatgtttatttttaatgatatgagaaaaattttgttaggccacaaaaacactgcactgtgaacattttagaaaaggtatgtcagactgggattaatgacagcatgattttcaatgactgtaaattgcgataaggaaatgtactgattgccaatacaccccaccctcattacatcatcaggacttgaagccaagggttaacccagcaagctacaaagagggtgtgtcacactgaaactcaatagttgagtttggctgttgttgcaggaaaatgattataactaaaagctctctgatagtgcagagacttaccagaagacacaaggaattgtactgaagagctattacaatccaaatattgccgtttcataaatgtaataagtaatactaattcacagagtattgtaaatggtggatgacaaaagaaaatctgctctgtggaaagaaagaactgtctctaccagggtcaagagcatgaacgcatcaatagaaagaactcggggaaacatcccatcaacaggactacacacttgtatatacattcttgagaacactgcaatgtgaaaatcacgtttgctatttataaacttgtccttagattaatgtgtctggacagattgtgggagtaagtgattcttctaagaattagatacttgtcactgcctatacctgcagctgaactgaatggtacttcgtatgttaatagttgttctgataaatcatgcaattaaagtaaagtgatgcaacatcttgtaaaaaaaaaaaaaaaaaaaa

SEQ ID NO: 183 - DNA, 6633 bp, Homo sapiens
  ref <308>: DATABASE ACCESSION NUMBER: GenBank No. NM006206
  ref <309>: DATABASE ENTRY DATE: 2004-10-26
ttctccccgccccccagttgttgtcgaagtctgggggttgggactggaccccctgattgcgtaagagcaaaaagcgaaggcgcaatctggacactgggagattcggagcgcagggagtttgagagaaacttttattttgaagagaccaaggttgagggggggcttatttcctgacagctatttacttagagcaaatgattagttttagaaggatggactataacattgaatcaattacaaaacgcggtttttgagcccattactgttggagctacagggagagaaacaggaggagactgcaagagatcatttgggaaggccgtgggcacgctctttactccatgtgtgggacattcattgcggaataacatcggaggagaagtttcccagagctatggggacttcccatccggcgttcctggtcttaggctgtcttctcacagggctgagcctaatcctctgccagctttcattaccctctatccttccaaatgaaaatgaaaaggttgtgcagctgaattcatccttttctctgagatgctttggggagagtgaagtgagctggcagtaccccatgtctgaagaagagagctccgatgtggaaatcagaaatgaagaaaacaacagcggcctttttgtgacggtcttggaagtgagcagtgcctcggcggcccacacagggttgtacacttgctattacaaccacactcagacagaagagaatgagcttgaaggcaggcacatttacatctatgtgccagacccagatgtagcctttgtacctctaggaatgacggattatttagtcatcgtggaggatgatgattctgccattataccttgtcgcacaactgatcccgagactcctgtaaccttacacaacagtgagggggtggtacctgcctcctacgacagcagacagggctttaatgggaccttcactgtagggccctatatctgtgaggccaccgtcaaaggaaagaagttccagaccatcccatttaatgtttatgctttaaaagcaacatcagagctggatctagaaatggaagctcttaaaaccgtgtataagtcaggggaaacgattgtggtcacctgtgctgtttttaacaatgaggtggttgaccttcaatggacttaccctggagaagtgaaaggcaaaggcatcacaatgctggaagaaatcaaagtcccatccatcaaattggtgtacactttgacggtccccgaggccacggtgaaagacagtggagattacgaatgtgctgcccgccaggctaccagggaggtcaaagaaatgaagaaagtcactatttctgtccatgagaaaggtttcattgaaatcaaacccaccttcagccagttggaagctgtcaacctgcatgaagtcaaacattttgttgtagaggtgcgggcctacccacctcccaggatatcctggctgaaaaacaatctgactctgattgaaaatctcactgagatcaccactgatgtggaaaagattcaggaaataaggtatcgaagcaaattaaagctgatccgtgctaaggaagaagacagtggccattatactattgtagctcaaaatgaagatgctgtgaagagctatacttttgaactgttaactcaagttccttcatccattctggacttggtcgatgatcaccatggctcaactgggggacagacggtgaggtgcacagctgaaggcacgccgcttcctgatattgagtggatgatatgcaaagatattaagaaatgtaataatgaaacttcctggactattttggccaacaatgtctcaaacatcatcacggagatccactcccgagacaggagtaccgtggagggccgtgtgactttcgccaaagtggaggagaccatcgccgtgcgatgcctggctaagaatctccttggagctgagaaccgagagctgaagctggtggctcccaccctgcgttctgaactcacggtggctgctgcagtcctggtgctgttggtgattgtgatcatctcacttattgtcctggttgtcatttggaaacagaaaccgaggtatgaaattcgctggagggtcattgaatcaatcagcccggatggacatgaatatatttatgtggacccgatgcagctgccttatgactcaagatgggagtttccaagagatggactagtgcttggtcgggtcttggggtctggagcgtttgggaaggtggttgaaggaacagcctatggattaagccggtcccaacctgtcatgaaagttgcagtgaagatgctaaaacccacggccagatccagtgaaaaacaagctctcatgtctgaactgaagataatgactcacctggggccacatttgaacattgtaaacttgctgggagcctgcaccaagtcaggccccatttacatcatcacagagtattgcttctatggagatttggtcaactatttgcataagaatagggatagcttcctgagccaccacccagagaagccaaagaaagagctggatatctttggattgaaccctgctgatgaaagcacacggagctatgttattttatcttttgaaaacaatggtgactacatggacatgaagcaggctgatactacacagtatgtccccatgctagaaaggaaagaggtttctaaatattccgacatccagagatcactctatgatcgtccagcctcatataagaagaaatctatgttagactcagaagtcaaaaacctcctttcagatgataactcagaaggccttactttattggatttgttgagcttcacctatcaagttgcccgaggaatggagtttttggcttcaaaaaattgtgtccaccgtgatctggctgctcgcaacgtcctcctggcacaaggaaaaattgtgaagatctgtgactttggcctggccagagacatcatgcatgattcgaactatgtgtcgaaaggcagtacctttctgcccgtgaagtggatggctcctgagagcatctttgacaacctctacaccacactgagtgatgtctggtcttatggcattctgctctgggagatcttttcccttggtggcaccccttaccccggcatgatggtggattctactttctacaataagatcaagagtgggtaccggatggccaagcctgaccacgctaccagtgaagtctacgagatcatggtgaaatgctggaacagtgagccggagaagagaccctccttttaccacctgagtgagattgtggagaatctgctgcctggacaatataaaaagagttatgaaaaaattcacctggacttcctgaagagtgaccatcctgctgtggcacgcatgcgtgtggactcagacaatgcatacattggtgtcacctacaaaaacgaggaagacaagctgaaggactgggagggtggtctggatgagcagagactgagcgctgacagtggctacatcattcctctgcctgacattgaccctgtccctgaggaggaggacctgggcaagaggaacagacacagctcgcagacctctgaagagagtgccattgagacgggttccagcagttccaccttcatcaagagagaggacgagaccattgaagacatcgacatgatggacgacatcggcatagactcttcagacctggtggaagacagcttcctgtaactggcggattcgaggggttccttccacttctggggccacctctggatcccgttcagaaaaccactttattgcaatgcggaggttgagaggaggacttggttgatgtttaaagagaagttcccagccaagggcctcggggagcgttctaaatatgaatgaatgggatattttgaaatgaactttgtcagtgttgcctctcgcaatgcctcagtagcatctcagtggtgtgtgaagtttggagatagatggataagggaataataggccacagaaggtgaactttgtgcttcaaggacattggtgagagtccaacagacacaatttatactgcgacagaacttcagcattgtaattatgtaaataactctaaccaaggctgtgtttagattgtattaactatcttctttggacttctgaagagaccactcaatccatccatgtacttccctcttgaaacctgatgtcagctgctgttgaactttttaaagaagtgcatgaaaaaccatttttgaaccttaaaaggtactggtactatagcattttgctatcttttttagtgttaagagataaagaataataattaaccaaccttgtttaatagatttgggtcatttagaagcctgacaactcattttcatattgtaatctatgtttataatactactactgttatcagtaatgctaaatgtgtaataatgtaacatgatttccctccagagaaagcacaatttaaaacaatccttactaagtaggtgatgagtttgacagtttttgacatttatattaaataacatgtttctctataaagtatggtaatagctttagtgaattaaatttagttgagcatagagaacaaagtaaaagtagtgttgtccaggaagtcagaatttttaactgtactgaataggttccccaatccatcgtattaaaaaacaattaactgccctctgaaataatgggattagaaacaaacaaaactcttaagtcctaaaagttctcaatgtagaggcataaacctgtgctgaacataacttctcatgtatattacccaatggaaaatataatgatcagcaaaaagactggatttgcagaagttttttttttttttcttcatgcctgatgaaagctttggcaaccccaatatatgtattttttgaatctatgaacctgaaaagggtcagaaggatgcccagacatcagcctccttctttcaccccttaccccaaagagaaagagtttgaaactcgagaccataaagatattctttagtggaggctggatgtgcattagcctggatcctcagttctcaaatgtgtgtggcagccaggatgactagatcctgggtttccatccttgagattctgaagtatgaagtctgagggaaaccagagtctgtatttttctaaactccctggctgttctgatcggccagttttcggaaacactgacttaggtttcaggaagttgccatgggaaacaaataatttgaactttggaacagggttggaattcaaccacgcaggaagcctactatttaaatccttggcttcaggttagtgacatttaatgccatctagctagcaattgcgaccttaatttaactttccagtcttagctgaggctgagaaagctaaagtttggttttgacaggttttccaaaagtaaagatgctacttcccactgtatgggggagattgaactttccccgtctcccgtcttctgcctcccactccataccccgccaaggaaaggcatgtacaaaaattatgcaattcagtgttccaagtctctgtgtaaccagctcagtgttttggtggaaaaaacattttaagttttactgataatttgaggttagatgggaggatgaattgtcacatctatccacactgtcaaacaggttggtgtgggttcattggcattctttgcaatactgcttaattgctgataccatatgaatgaaacatgggctgtgattactgcaatcactgtgctatcggcagatgatgctttggaagatgcagaagcaataataaagtacttgactacctactggtgtaatctcaatgcaagccccaactttcttatccaactttttcatagtaagtgcgaagactgagccagattggccaattaaaaacgaaaacctgactaggttctgtagagccaattagacttgaaatacgtttgtgtttctagaatcacagctcaagcattctgtttatcgctcactctcccttgtacagccttattttgttggtgctttgcattttgatattgctgtgagccttgcatgacatcatgaggccggatgaaacttctcagtccagcagtttccagtcctaacaaatgctcccacctgaatttgtatatgactgcatttgtgggtgtgtgtgtgttttcagcaaattccagatttgtttccttttggcctcctgcaaagtctccagaagaaaatttgccaatctttcctactttctatttttatgatgacaatcaaagccggcctgagaaacactatttgtgactttttaaacgattagtgatgtccttaaaatgtggtctgccaatctgtacaaaatggtcctatttttgtgaagagggacataagataaaatgatgttatacatcaatatgtatatatgtatttctatatagacttggagaatactgccaaaacatttatgacaagctgtatcactgccttcgtttatatttttttaactgtgataatccccacaggcacattaactgttgcacttttgaatgtccaaaatttatattttagaaataataaaaagaaagatacttacatgttcccaaaacaatggtgtggtgaatgtgtgagaaaaactaacttgatagggtctaccaatacaaaatgtattacgaatgcccctgttcatgtttttgttttaaaacgtgtaaatgaagatctttatatttcaataaatgatatataatttaaagtt

SEQ ID NO: 184 - DNA, 2236 bp, Homo sapiens
  ref <308>: DATABASE ACCESSION NUMBER: GenBank No. NM001065
  ref <309>: DATABASE ENTRY DATE: 2004-10-27
gctgttgcaacactgcctcactcttcccctcccaccttctctcccctcctctctgctttaattttctcagaattctctggactgaggctccagttctggcctttggggttcaagatcactgggaccaggccgtgatctctatgcccgagtctcaaccctcaactgtcaccccaaggcacttgggacgtcctggacagaccgagtcccgggaagccccagcactgccgctgccacactgccctgagcccaaatgggggagtgagaggccatagctgtctggcatgggcctctccaccgtgcctgacctgctgctgccactggtgctcctggagctgttggtgggaatatacccctcaggggttattggactggtccctcacctaggggacagggagaagagagatagtgtgtgtccccaaggaaaatatatccaccctcaaaataattcgatttgctgtaccaagtgccacaaaggaacctacttgtacaatgactgtccaggcccggggcaggatacggactgcagggagtgtgagagcggctccttcaccgcttcagaaaaccacctcagacactgcctcagctgctccaaatgccgaaaggaaatgggtcaggtggagatctcttcttgcacagtggaccgggacaccgtgtgtggctgcaggaagaaccagtaccggcattattggagtgaaaaccttttccagtgcttcaattgcagcctctgcctcaatgggaccgtgcacctctcctgccaggagaaacagaacaccgtgtgcacctgccatgcaggtttctttctaagagaaaacgagtgtgtctcctgtagtaactgtaagaaaagcctggagtgcacgaagttgtgcctaccccagattgagaatgttaagggcactgaggactcaggcaccacagtgctgttgcccctggtcattttctttggtctttgccttttatccctcctcttcattggtttaatgtatcgctaccaacggtggaagtccaagctctactccattgtttgtgggaaatcgacacctgaaaaagagggggagcttgaaggaactactactaagcccctggccccaaacccaagcttcagtcccactccaggcttcacccccaccctgggcttcagtcccgtgcccagttccaccttcacctccagctccacctatacccccggtgactgtcccaactttgcggctccccgcagagaggtggcaccaccctatcagggggctgaccccatccttgcgacagccctcgcctccgaccccatccccaacccccttcagaagtgggaggacagcgcccacaagccacagagcctagacactgatgaccccgcgacgctgtacgccgtggtggagaacgtgcccccgttgcgctggaaggaattcgtgcggcgcctagggctgagcgaccacgagatcgatcggctggagctgcagaacgggcgctgcctgcgcgaggcgcaatacagcatgctggcgacctggaggcggcgcacgccgcggcgcgaggccacgctggagctgctgggacgcgtgctccgcgacatggacctgctgggctgcctggaggacatcgaggaggcgctttgcggccccgccgccctcccgcccgcgcccagtcttctcagatgaggctgcgcccctgcgggcagctctaaggaccgtcctgcgagatcgccttccaaccccacttttttctggaaaggaggggtcctgcaggggcaagcaggagctagcagccgcctacttggtgctaacccctcgatgtacatagcttttctcagctgcctgcgcgccgccgacagtcagcgctgtgcgcgcggagagaggtgcgccgtgggctcaagagcctgagtgggtggtttgcgaggatgagggacgctatgcctcatgcccgttttgggtgtcctcaccagcaaggctgctcgggggcccctggttcgtccctgagcctttttcacagtgcataagcagttttttttgtttttgttttgttttgttttgtttttaaatcaatcatgttacactaatagaaacttggcactcctgtgccctctgcctggacaagcacatagcaagctgaactgtcctaaggcaggggcgagcacggaacaatggggccttcagctggagctgtggacttttgtacatacactaaaattctgaagttaaagctctgctcttggaaaaaaaaaaaaaaaaaaaaaaaaaaaaaaaaa

SEQ ID NO: 185 - DNA, 5830 bp, Homo sapiens
  ref <308>: DATABASE ACCESSION NUMBER: GenBank No. NM002253
  ref <309>: DATABASE ENTRY DATE: 2004-10-26
actgagtcccgggaccccgggagagcggtcagtgtgtggtcgctgcgtttcctctgcctgcgccgggcatcacttgcgcgccgcagaaagtccgtctggcagcctggatatcctctcctaccggcacccgcagacgcccctgcagccgccggtcggcgcccgggctccctagccctgtgcgctcaactgtcctgcgctgcggggtgccgcgagttccacctccgcgcctccttctctagacaggcgctgggagaaagaaccggctcccgagttctgggcatttcgcccggctcgaggtgcaggatgcagagcaaggtgctgctggccgtcgccctgtggctctgcgtggagacccgggccgcctctgtgggtttgcctagtgtttctcttgatctgcccaggctcagcatacaaaaagacatacttacaattaaggctaatacaactcttcaaattacttgcaggggacagagggacttggactggctttggcccaataatcagagtggcagtgagcaaagggtggaggtgactgagtgcagcgatggcctcttctgtaagacactcacaattccaaaagtgatcggaaatgacactggagcctacaagtgcttctaccgggaaactgacttggcctcggtcatttatgtctatgttcaagattacagatctccatttattgcttctgttagtgaccaacatggagtcgtgtacattactgagaacaaaaacaaaactgtggtgattccatgtctcgggtccatttcaaatctcaacgtgtcactttgtgcaagatacccagaaaagagatttgttcctgatggtaacagaatttcctgggacagcaagaagggctttactattcccagctacatgatcagctatgctggcatggtcttctgtgaagcaaaaattaatgatgaaagttaccagtctattatgtacatagttgtcgttgtagggtataggatttatgatgtggttctgagtccgtctcatggaattgaactatctgttggagaaaagcttgtcttaaattgtacagcaagaactgaactaaatgtggggattgacttcaactgggaatacccttcttcgaagcatcagcataagaaacttgtaaaccgagacctaaaaacccagtctgggagtgagatgaagaaatttttgagcaccttaactatagatggtgtaacccggagtgaccaaggattgtacacctgtgcagcatccagtgggctgatgaccaagaagaacagcacatttgtcagggtccatgaaaaaccttttgttgcttttggaagtggcatggaatctctggtggaagccacggtgggggagcgtgtcagaatccctgcgaagtaccttggttacccacccccagaaataaaatggtataaaaatggaataccccttgagtccaatcacacaattaaagcggggcatgtactgacgattatggaagtgagtgaaagagacacaggaaattacactgtcatccttaccaatcccatttcaaaggagaagcagagccatgtggtctctctggttgtgtatgtcccaccccagattggtgagaaatctctaatctctcctgtggattcctaccagtacggcaccactcaaacgctgacatgtacggtctatgccattcctcccccgcatcacatccactggtattggcagttggaggaagagtgcgccaacgagcccagccaagctgtctcagtgacaaacccatacccttgtgaagaatggagaagtgtggaggacttccagggaggaaataaaattgaagttaataaaaatcaatttgctctaattgaaggaaaaaacaaaactgtaagtacccttgttatccaagcggcaaatgtgtcagctttgtacaaatgtgaagcggtcaacaaagtcgggagaggagagagggtgatctccttccacgtgaccaggggtcctgaaattactttgcaacctgacatgcagcccactgagcaggagagcgtgtctttgtggtgcactgcagacagatctacgtttgagaacctcacatggtacaagcttggcccacagcctctgccaatccatgtgggagagttgcccacacctgtttgcaagaacttggatactctttggaaattgaatgccaccatgttctctaatagcacaaatgacattttgatcatggagcttaagaatgcatccttgcaggaccaaggagactatgtctgccttgctcaagacaggaagaccaagaaaagacattgcgtggtcaggcagctcacagtcctagagcgtgtggcacccacgatcacaggaaacctggagaatcagacgacaagtattggggaaagcatcgaagtctcatgcacggcatctgggaatccccctccacagatcatgtggtttaaagataatgagacccttgtagaagactcaggcattgtattgaaggatgggaaccggaacctcactatccgcagagtgaggaaggaggacgaaggcctctacacctgccaggcatgcagtgttcttggctgtgcaaaagtggaggcatttttcataatagaaggtgcccaggaaaagacgaacttggaaatcattattctagtaggcacggcggtgattgccatgttcttctggctacttcttgtcatcatcctacggaccgttaagcgggccaatggaggggaactgaagacaggctacttgtccatcgtcatggatccagatgaactcccattggatgaacattgtgaacgactgccttatgatgccagcaaatgggaattccccagagaccggctgaagctaggtaagcctcttggccgtggtgcctttggccaagtgattgaagcagatgcctttggaattgacaagacagcaacttgcaggacagtagcagtcaaaatgttgaaagaaggagcaacacacagtgagcatcgagctctcatgtctgaactcaagatcctcattcatattggtcaccatctcaatgtggtcaaccttctaggtgcctgtaccaagccaggagggccactcatggtgattgtggaattctgcaaatttggaaacctgtccacttacctgaggagcaagagaaatgaatttgtcccctacaagaccaaaggggcacgattccgtcaagggaaagactacgttggagcaatccctgtggatctgaaacggcgcttggacagcatcaccagtagccagagctcagccagctctggatttgtggaggagaagtccctcagtgatgtagaagaagaggaagctcctgaagatctgtataaggacttcctgaccttggagcatctcatctgttacagcttccaagtggctaagggcatggagttcttggcatcgcgaaagtgtatccacagggacctggcggcacgaaatatcctcttatcggagaagaacgtggttaaaatctgtgactttggcttggcccgggatatttataaagatccagattatgtcagaaaaggagatgctcgcctccctttgaaatggatggccccagaaacaatttttgacagagtgtacacaatccagagtgacgtctggtcttttggtgttttgctgtgggaaatattttccttaggtgcttctccatatcctggggtaaagattgatgaagaattttgtaggcgattgaaagaaggaactagaatgagggcccctgattatactacaccagaaatgtaccagaccatgctggactgctggcacggggagcccagtcagagacccacgttttcagagttggtggaacatttgggaaatctcttgcaagctaatgctcagcaggatggcaaagactacattgttcttccgatatcagagactttgagcatggaagaggattctggactctctctgcctacctcacctgtttcctgtatggaggaggaggaagtatgtgaccccaaattccattatgacaacacagcaggaatcagtcagtatctgcagaacagtaagcgaaagagccggcctgtgagtgtaaaaacatttgaagatatcccgttagaagaaccagaagtaaaagtaatcccagatgacaaccagacggacagtggtatggttcttgcctcagaagagctgaaaactttggaagacagaaccaaattatctccatcttttggtggaatggtgcccagcaaaagcagggagtctgtggcatctgaaggctcaaaccagacaagcggctaccagtccggatatcactccgatgacacagacaccaccgtgtactccagtgaggaagcagaacttttaaagctgatagagattggagtgcaaaccggtagcacagcccagattctccagcctgactcggggaccacactgagctctcctcctgtttaaaaggaagcatccacaccccaactcccggacatcacatgagaggtctgctcagattttgaagtgttgttctttccaccagcaggaagtagccgcatttgattttcatttcgacaacagaaaaaggacctcggactgcagggagccagtcttctaggcatatcctggaagaggcttgtgacccaagaatgtgtctgtgtcttctcccagtgttgacctgatcctcttttttcattcatttaaaaagcattatcatgcccctgctgcgggtctcaccatgggtttagaacaaagagcttcaagcaatggccccatcctcaaagaagtagcagtacctggggagctgacacttctgtaaaactagaagataaaccaggcaacgtaagtgttcgaggtgttgaagatgggaaggatttgcagggctgagtctatccaagaggctttgtttaggacgtgggtcccaagccaagccttaagtgtggaattcggattgatagaaaggaagactaacgttaccttgctttggagagtactggagcctgcaaatgcattgtgtttgctctggtggaggtgggcatggggtctgttctgaaatgtaaagggttcagacggggtttctggttttagaaggttgcgtgttcttcgagttgggctaaagtagagttcgttgtgctgtttctgactcctaatgagagttccttccagaccgttagctgtctccttgccaagccccaggaagaaaatgatgcagctctggctccttgtctcccaggctgatcctttattcagaataccacaaagaaaggacattcagctcaaggctccctgccgtgttgaagagttctgactgcacaaaccagcttctggtttcttctggaatgaataccctcatatctgtcctgatgtgatatgtctgagactgaatgcgggaggttcaatgtgaagctgtgtgtggtgtcaaagtttcaggaaggattttacccttttgttcttccccctgtccccaacccactctcaccccgcaacccatcagtattttagttatttggcctctactccagtaaacctgattgggtttgttcactctctgaatgattattagccagacttcaaaattattttatagcccaaattataacatctattgtattatttagacttttaacatatagagctatttctactgatttttgcccttgttctgtcctttttttcaaaaaagaaaatgtgttttttgtttggtaccatagtgtgaaatgctgggaacaatgactataagacatgctatggcacatatatttatagtctgtttatgtagaaacaaatgtaatatattaaagccttatatataatgaactttgtactattcacattttgtatcagtattatgtagcataacaaaggtcataatgctttcagcaattgatgtcattttattaaagaacattgaaaaacttga

SEQ ID NO: 186 - protein, 972 aa, Homo sapiens
  ref <308>: DATABASE ACCESSION NUMBER: GenBank No. NP005202
  ref <309>: DATABASE ENTRY DATE: 2004-10-26
MGPGVLLLLLVATAWHGQGIPVIEPSVPELVVKPGATVTLRCVGNGSVEWDGPPSPHWTLYSDGSSSILSTNNATFQNTGTYRCTEPGDPLGGSAAIHLYVKDPARPWNVLAQEVVVFEDQDALLPCLLTDPVLEAGVSLVRVRGRPLMRHTNYSFSPWHGFTIHRAKFIQSQDYQCSALMGGRKVMSISIRLKVQKVIPGPPALTLVPAELVRIRGEAAQIVCSASSVDVNFDVFLQHNNTKLAIPQQSDFHNNRYQKVLTLNLDQVDFQHAGNYSCVASNVQGKHSTSMFFRVVESAYLNLSSEQNLIQEVTVGEGLNLKVMVEAYPGLQGFNWTYLGPFSDHQPEPKLANATTKDTYRHTFTLSLPRLKPSEAGRYSFLARNPGGWRALTFELTLRYPPEVSVIWTFINGSGTLLCAASGYPQPNVTWLQCSGHTDRCDEAQVLQVWDDPYPEVLSQEPFHKVTVQSLLTVETLEHNQTYECRAHNSVGSGSWAFIPISAGAHTHPPDEFLFTPVVVACMSIMALLLLLLLLLLYKYKQKPKYQVRWKIIESYEGNSYTFIDPTQLPYNEKWEFPRNNLQFGKTLGAGAFGKVVEATAFGLGKEDAVLKVAVKMLKSTAHADEKEALMSELKIMSHLGQHENIVNLLGACTHGGPVLVITEYCCYGDLLNFLRRKAEAMLGPSLSPGQDPEGGVDYKNIHLEKKYVRRDSGFSSQGVDTYVEMRPVSTSSNDSFSEQDLDKEDGRPLELRDLLHFSSQVAQGMAFLASKNCIHRDVAARNVLLTNGHVAKIGDFGLARDIMNDSNYIVKGNARLPVKWMAPESIFDCVYTVQSDVWSYGILLWEIFSLGLNPYPGILVNSKFYKLVKDGYQMAQPAFAPKNIYSIMQACWALEPTHRPTFQQICSFLQEQAQEDRRERDYTNLPSSSRSGGSGSSSSELEEESSSEHLTCCEQGDIAQPLLQPNNYQFC

SEQ ID NO: 187 - protein, 913 aa, Homo sapiens
  ref <308>: DATABASE ACCESSION NUMBER: GenBank No. NP054699
  ref <309>: DATABASE ENTRY DATE: 2004-10-26
MGPEALSSLLLLLLVASGDADMKGHFDPAKCRYALGMQDRTIPDSDISASSSWSDSTAARHSRLESSDGDGAWCPAGSVFPKEEEYLQVDLQRLHLVALVGTQGRHAGGLGKEFSRSYRLRYSRDGRRWMGWKDRWGQEVISGNEDPEGVVLKDLGPPMVARLVRFYPRADRVMSVCLRVELYGCLWRDGLLSYTAPVGQTMYLSEAVYLNDSTYDGHTVGGLQYGGLGQLADGVVGLDDFRKSQELRVWPGYDYVGWSNHSFSSGYVEMEFEFDRLRAFQAMQVHCNNMHTLGARLPGGVECRFRRGPAMAWEGEPMRHNLGGNLGDPRARAVSVPLGGRVARFLQCRFLFAGPWLLFSEISFISDVVNNSSPALGGTFPPAPWWPPGPPPTNFSSLELEPRGQQPVAKAEGSPTAILIGCLVAIILLLLLIIALMLWRLHWRRLLSKAERRVLEEELTVHLSVPGDTILINNRPGPREPPPYQEPRPRGNPPHSAPCVPNGSALLLSNPAYRLLLATYARPPRGPGPPTPAWAKPTNTQAYSGDYMEPEKPGAPLLPPPPQNSVPHYAEADIVTLQGVTGGNTYAVPALPPGAVGDGPPRVDFPRSRLRFKEKLGEGQFGEVHLCEVDSPQDLVSLDFPLNVRKGHPLLVAVKILRPDATKNARNDFLKEVKIMSRLKDPNIIRLLGVCVQDDPLCMITDYMENGDLNQFLSAHQLEDKAAEGAPGDGQAAQGPTISYPMLLHVAAQIASGMRYLATLNFVHRDLATRNCLVGENFTIKIADFGMSRNLYAGDYYRVQGRAVLPIRWMAWECILMGKFTTASDVWAFGVTLWEVLMLCRAQPFGSAHRRAGHRERGGVLPGPGPAVYLSRPPACPQGLYELMLRCWSRESEQRPPFSQLHRFLAEDALNTV

SEQ ID NO: 188 - protein, 855 aa, Homo sapiens
  ref <308>: DATABASE ACCESSION NUMBER: GenBank No. NP006173
  ref <309>: DATABASE ENTRY DATE: 2004-10-26
MILIPRMLLVLFLLLPILSSAKAQVNPAICRYPLGMSGGQIPDEDITASSQWSESTAAKYGRLDSEEGDGAWCPEIPVEPDDLKEFLQIDLHTLHFITLVGTQGRHAGGHGIEFAPMYKINYSRDGTRWISWRNRHGKQVLDGNSNPYDIFLKDLEPPIVARFVRFIPVTDHSMNVCMRVELYGCVWLDGLVSYNAPAGQQFVLPGGSIIYLNDSVYDGAVGYSMTEGLGQLTDGVSGLDDFTQTHEYHVWPGYDYVGWRNESATNGYIEIMFEFDRIRNFTTMKVHCNNMFAKGVKIFKEVQCYFRSEASEWEPNAISFPLVLDDVNPSARFVTVPLHHRMASAIKCQYHFADTWMMFSEITFQSDAAMYNNSEALPTSPMAPTTYDPMLKVDDSNTRILIGCLVAIIFILLAIIVIILWRQFWQKMLEKASRRMLDDEMTVSLSLPSDSSMFNNNRSSSPSEQGSNSTYDRIFPLRPDYQEPSRLIRKLPEFAPGEEESGCSGVVKPVQPSGPEGVPHYAEADIVNLQGVTGGNTYSVPAVTMDLLSGKDVAVEEFPRKLLTFKEKLGEGQFGEVHLCEVEGMEKFKDKDFALDVSANQPVLVAVKMLRADANKNARNDFLKEIKIMSRLKDPNIIHLLSVCITDDPLCMITEYMENGDLNQFLSRHEPPNSSSSDVRTVSYTNLKFMATQIASGMKYLSSLNFVHRDLATRNCLVGKNYTIKIADFGMSRNLYSGDYYRIQGRAVLPIRWMSWESILLGKFTTASDVWAFGVTLWETFTFCQEQPYSQLSDEQVIENTGEFFRDQGRQTYLPQPAICPDSVYKLMLSCWRRDTKNRPSFQEIHLLLLQQGDE

SEQ ID NO: 189 - protein, 1210 aa, Homo sapiens [sequence omitted]

SEQ ID NO: 190 - protein, 976 aa, Homo sapiens
  ref <308>: DATABASE ACCESSION NUMBER: GenBank No. NP005223
  ref <309>: DATABASE ENTRY DATE: 2004-11-29
MERRWPLGLGLVLLLCAPLPPGARAKEVTLMDTSKAQGELGWLLDPPKDGWSEQQQILNGTPLYMYQDCPMQGRRDTDHWLRSNWIYRGEEASRVHVELQFTVRDCKSFPGGAGPLGCKETFNLLYMESDQDVGIQLRRPLFQKVTTVAADQSFTIRDLASGSVKLNVERCSLGRLTRRGLYLAFHNPGACVALVSVRVFYQRCPETLNGLAQFPDTLPGPAGLVEVAGTCLPHARASPRPSGAPRMHCSPDGEWLVPVGRCHCEPGYEEGGSGEACVACPSGSYRMDMDTPHCLTCPQQSTAESEGATICTCESGHYRAPGEGPQVACTGPPSAPRNLSFSASGTQLSLRWEPPADTGGRQDVRYSVRCSQCQGTAQDGGPCQPCGVGVHFSPGARGLTTPAVHVNGLEPYANYTFNVEAQNGVSGLGSSGHASTSVSISMGHAESLSGLSLRLVKKEPRQLELTWAGSRPRSPGANLTYELHVLNQDEERYQMVLEPRVLLTELQPDTTYIVRVRMLTPLGPGPFSPDHEFRTSPPVSRGLTGGEIVAVIFGLLLGAALLLGILVFRSRRAQRQRQQRQRDRATDVDREDKLWLKPYVDLQAYEDPAQGALDFTRELDPAWLMVDTVIGEGEFGEVYRGTLRLPSQDCKTVAIKTLKDTSPGGQWWNFLREATIMGQFSHPHILHLEGVVTKRKPIMIITEFMENGALDAFLREREDQLVPGQLVAMLQGIASGMNYLSNHNYVHRDLAARNILVNQNLCCKVSDFGLTRLLDDFDGTYETQGGKIPIRWTAPEAIAHRIFTTASDVWSFGIVMWEVLSFGDKPYGEMSNQEVMKSIEDGYRLPPPVDCPAPLYELMKNCWAYDRARRPHFQKLQAHLEQLLANPHSLRTIANFDPRMTLRLPSLSGSDGIPYRTVSEWLESIRMKRYILHFHSAGLDTMECVLELTAEDLTQMGITLPGHQKRILCSIQGFKD

SEQ ID NO: 191 - protein, 976 aa, Homo sapiens
  ref <308>: DATABASE ACCESSION NUMBER: GenBank No. NP004422
  ref <309>: DATABASE ENTRY DATE: 2004-12-20
MELQAARACFALLWGCALAAAAAAQGKEVVLLDFAAAGGELGWLTHPYGKGWDLMQNIMNDMPIYMYSVCNVMSGDQDNWLRTNWVYRGEAERIFIELKFTVRDCNSFPGGASSCKETFNLYYAESDLDYGTNFQKRLFTKIDTIAPDEITVSSDFEARHVKLNVEERSVGPLTRKGFYLAFQDIGACVALLSVRVYYKKCPELLQGLAHFPETIAGSDAPSLATVAGTCVDHAVVPPGGEEPRMHCAVDGEWLVPIGQCLCQAGYEKVEDACQACSPGFFKFEASESPCLECPEHTLPSPEGATSCECEEGFFRAPQDPASMPCTRPPSAPHYLTAVGMGAKVELRWTPPQDSGGREDIVYSVTCEQCWPESGECGPCEASVRYSEPPHGLTRTSVTVSDLEPHMNYTFTVEARNGVSGLVTSRSFRTASVSINQTEPPKVRLEGRSTTSLSVSWSIPPPQQSRVWKYEVTYRKKGDSNSYNVRRTEGFSVTLDDLAPDTTYLVQVQALTQEGQGAGSKVHEFQTLSPEGSGNLAVIGGVAVGVVLLLVLAGVGFFIHRRRKNQRARQSPEDVYFSKSEQLKPLKTYVDPHTYEDPNQAVLKFTTEIHPSCVTRQKVIGAGEFGEVYKGMLKTSSGKKEVPVAIKTLKAGYTEKQRVDFLGEAGIMGQFSHHNIIRLEGVISKYKPMMIITEYMENGALDKFLREKDGEFSVLQLVGMLRGIAAGMKYLANMNYVHRDLAARNILVNSNLVCKVSDFGLSRVLEDDPEATYTTSGGKIPIRWTAPEAISYRKFTSASDVWSFGIVMWEVMTYGERPYWELSNHEVMKAINDGFRLPTPMDCPSAIYQLMMQCWQQERARRPKFADIVSILDKLIRAPDSLKTLADFDPRVSIRLPSTSGSEGVPFRTVSEWLESIKMQQYTEHFMAAGYTAIEKVVQMTNDDIKRIGVRLPGHQKRIAYSLLGLKDQVNTVGIPI

SEQ ID NO: 192 - protein, 983 aa, Homo sapiens
  ref <308>: DATABASE ACCESSION NUMBER: GenBank No. NP005224
  ref <309>: DATABASE ENTRY DATE: 2004-11-16
MDCQLSILLLLSCSVLDSFGELIPQPSNEVNLLDSKTIQGELGWISYPSHGWEEISGVDEHYTPIRTYQVCNVMDHSQNNWLRTNWVPRNSAQKIYVELKFTLRDCNSIPLVLGTCKETFNLYYMESDDDHGVKFREHQFTKIDTIAADESFTQMDLGDRILKLNTEIREVGPVNKKGFYLAFQDVGACVALVSVRVYFKKCPFTVKNLAMFPDTVPMDSQSLVEVRGSCVNNSKEEDPPRMYCSTEGEWLVPIGKCSCNAGYEERGFMCQACRPGFYKALDGNMKCAKCPPHSSTQEDGSMNCRCENNYFRADKDPPSMACTRPPSSPRNVISNINETSVILDWSWPLDTGGRKDVTFNIICKKCGWNIKQCEPCSPNVRFLPRQFGLTNTTVTVTDLLAHTNYTFEIDAVNGVSELSSPPRQFAAVSITTNQAAPSPVLTIKKDRTSRNSISLSWQEPEHPNGIILDYEVKYYEKQEQETSYTILRARGTNVTISSLKPDTIYVFQIRARTAAGYGTNSRKFEFETSPDSFSISGESSQVVMIAISAAVAIILLTVVIYVLIGRFCGYKSKHGADEKRLHFGNGHLKLPGLRTYVDPHTYEDPTQAVHEFAKELDATNISIDKVVGAGEFGEVCSGRLKLPSKKEISVAIKTLKVGYTEKQRRDFLGEASIMGQFDHPNIIRLEGVVTKSKPVMIVTEYMENGSLDSFLRKHDAQFTVIQLVGMLRGIASGMKYLSDMGYVHRDLAARNILINSNLVCKVSDFGLSRVLEDDPEAAYTTRGGKIPIRWTSPEAIAYRKFTSASDVWSYGIVLWEVMSYGERPYWEMSNQDVIKAVDEGYRLPPPMDCPAALYQLMLDCWQKDRNNRPKFEQIVSILDKLIRNPGSLKIITSAAARPSNLLLDQSNVDITTFRTTGDWLNGVWTAHCKEIFTGVEYSSCDTIAKISTDDMKKVGVTVVGPQKKIISSIKALETQSKNGPVPV

SEQ ID NO: 193 - protein, 986 aa, Homo sapiens
  ref <308>: DATABASE ACCESSION NUMBER: GenBank No. NP004429
  ref <309>: DATABASE ENTRY DATE: 2004-11-16
MAGIFYFALFSCLFGICDAVTGSRVYPANEVTLLDSRSVQGELGWIASPLEGGWEEVSIMDEKNTPIRTYQVCNVMEPSQNNWLRTDWITREGAQRVYIEIKFTLRDCNSLPGVMGTCKETFNLYYYESDNDKERFIRENQFVKIDTIAADESFTQVDIGDRIMKLNTEIRDVGPLSKKGFYLAFQDVGACIALVSVRVFYKKCPLTVRNLAQFPDTITGADTSSLVEVRGSCVNNSEEKDVPKMYCGADGEWLVPIGNCLCNAGHEERSGECQACKIGYYKALSTDATCAKCPPHSYSVWEGATSCTCDRGFFRADNDAASMPCTRPPSAPLNLISNVNETSVNLEWSSPQNTGGRQDISYNVVCKKCGAGDPSKCRPCGSGVHYTPQQNGLKTTKVSITDLLAHTNYTFEIWAVNGVSKYNPNPDQSVSVTVTTNQAAPSSIALVQAKEVTRYSVALAWLEPDRPNGVILEYEVKYYEKDQNERSYRIVRTAARNTDIKGLNPLTSYVFHVRARTAAGYGDFSEPLEVTTNTVPSRIIGDGANSTVLLVSVSGSVVLVVILIAAFVISRRRSKYSKAKQEADEEKHLNQGVRTYVDPFTYEDPNQAVREFAKEIDASCIKIEKVIGVGEFGEVCSGRLKVPGKREICVAIKTLKAGYTDKQRRDFLSEASIMGQFDHPNIIHLEGVVTKCKPVMIITEYMENGSLDAFLRKNDGRFTVIQLVGMLRGIGSGMKYLSDMSYVHRDLAARNILVNSNLVCKVSDFGMSRVLEDDPEAAYTTRGGKIPIRWTAPEAIAYRKFTSASDVWSYGIVMWEVMSYGERPYWDMSNQDVIKAIEEGYRLPPPMDCPIALHQLMLDCWQKERSDRPKFGQIVNMLDKLIRNPNSLKRTGTESSRPNTALLDPSSPEFSAVVSVGDWLQAIKMDRYKDNFTAAGYTTLEAVVHVNQEDLARIGITAITHQNKILSSVQAMRTQMQQMHGRMVPV

SEQ ID NO: 194 - protein, 991 aa, Homo sapiens
  ref <308>: DATABASE ACCESSION NUMBER: GenBank No. AAA74245
  ref <309>: DATABASE ENTRY DATE: 1995-08-10
PASLAGCYSAPRRAPLWTCLLLCAALRTLLASPSNEVNLLDSRTVMGDLGWIAFPKNGWEEIGEVDENYAPIHTYQVCKVMEQNQNNWLLTSWISNEGASRIFIELKFTLRDCNSLPGGLGTCKETFNMYYFESDDQNGRNIKENQYIKIDTIAADESFTELDLGDRVMKLNTEVRDVGPLSKKGFYLAFQDVGACIALVSVRVYYKKCPSVVRHLAVFPDTITGADSSQLLEVSGSCVNHSVTDEPPKMHCSAEGEWLVPIGKCMCKAGYEEKNGTCQVCRPGFFKASPHIQSCGKCPPHSYTHEEASTSCVCEKDYFRRESDPPTMACTRPPSAPRNAISNVNETSVFLEWIPPADTGGRKDVSYYIACKKCNSHAGVCEECGGHVRYLPRQSGLKNTSVMMVDLLAHTNYTFEIEAVNGVSDLSPGARQYVSVNVTTNQAAPSPVTNVKKGKIAKNSISLSWQEPDRPNGIILEYEIKHFEKDQETSYTIIKSKETTITAEGLKPASVYVFQIRARTAAGYGVFSRRFEFETTPVFAASSDQSQIPVIAVSVTVGVILLAVVIGVLLSGRRCGYSKAKQDPEEEKMHFHNGHIKLPGVRTYIDPHTYEDPNQAVHEFAKEIEASCITIERVIGAGEFGEVCSGRLKLPGKRELPVAIKTLKVGYTEKQRRDFLGEASIMGQFDHPNIIHLEGVVTKSKPVMIVTEYMENGSLDTFLKKNDGQFTVIQLVGMLRGISAGMKYLSDMGYVHRDLAARNILINSNLVCKVSDFGLSRVLEDDPEAAYTTRGGKIPIRWTAPEAIAFRKFTSASDVWSYGIVMWEVVSYGERPYWEMTNQDVIKAVEEGYRLPSPMDCPAALYQLMLDCWQKERNSRPKFDEIVNMLDKLIRNPSSLKTLVNASCRVSNLLAEHSPLGSGAYRSVGEWLEAIKMGRYTEIFMENGYSSMDAVAQVTLEDLRRLGVTLVGHQKKIMNSLQEMKVQLVNGMVPL

SEQ ID NO: 195 - protein, 334 aa, Homo sapiens
  ref <308>: DATABASE ACCESSION NUMBER: GenBank No. CAB63775
  ref <309>: DATABASE ENTRY DATE: 2005-01-20
MKDSPFQVTKLYWLNEKWDFIASASDMAAEQGQILVIATAAVGGFTLLVILTLFFLITGRCQWYIKAKMKSEEKRRNHLQNGHLRFPGIKTYIDPDTYEDPSLAVHEFAKEIDPSRIRIERVIGAGEFGEVCSGRLKTPGKREIPVAIKTLKGGHMDRQRRDFLREASIMGQFDHPNIIRLEGVVTKRSFPAIGVEAFCPSFLRAGFLNSIQAPHPVPGGGSLPPRIPAGRPVMIVVEYMENGSLDSFLRKHDGHFTVIQLVGMLRGIASGMKYLSDMGYVHRDLAARNILVNSNLVCKVSDFGLSRVLEDDPEAAYTTTDLFQTLTLNLCYSA

SEQ ID NO: 196 - protein, 998 aa, Homo sapiens
  ref <308>: DATABASE ACCESSION NUMBER: GenBank No. NP004431
  ref <309>: DATABASE ENTRY DATE: 2005-01-26
MVFQTRYPSWIILCYIWLLRFAHTGEAQAAKEVLLLDSKAQQTELEWISSPPNGWEEISGLDENYTPIRTYQVCQVMEPNQNNWLRTNWISKGNAQRIFVELKFTLRDCNSLPGVLGTCKETFNLYYYETDYDTGRNIRENLYVKIDTIAADESFTQGDLGERKMKLNTEVREIGPLSKKGFYLAFQDVGACIALVSVKVYYKKCWSIIENLAIFPDTVTGSEFSSLVEVRGTCVSSAEEEAENAPRMHCSAEGEWLVPIGKCICKAGYQQKGDTCEPCGRGFYKSSSQDLQCSRCPTHSFSDKEGSSRCECEDGYYRAPSDPPYVACTRPPSAPQNLIFNINQTTVSLEWSPPADNGGRNDVTYRILCKRCSWEQGECVPCGSNIGYMPQQTGLEDNYVTVMDLLAHANYTFEVEAVNGVSDLSRSQRLFAAVSITTGQAAPSQVSGVMKERVLQRSVELSWQEPEHPNGVITEYEIKYYEKDQRERTYSTVKTKSTSASINNLKPGTVYVFQIRAFTAAGYGNYSPRLDVATLEEATGKMFEATAVSSEQNPVIIIAVVAVAGTIILVFMVFGFIIGRRHCGYSKADQEGDEELYFHFKFPGTKTYIDPETYEDPNRAVHQFAKELDASCIKIERVIGAGEFGEVCSGRLKLPGKRDVAVAIKTLKVGYTEKQRRDFLCEASIMGQFDHPNVVHLEGVVTRGKPVMIVIEFMENGALDAFLRKHDGQFTVIQLVGMLRGIAAGMRYLADMGYVHRDLAARNILVNSNLVCKVSDFGLSRVIEDDPEAVYTTTGGKIPVRWTAPEAIQYRKFTSASDVWSYGIVMWEVMSYGERPYWDMSNQDVIKAIEEGYRLPAPMDCPAGLHQLMLDCWQKERAERPKFEQIVGILDKMIRNPNSLKTPLGTCSRPISPLLDQNTPDFTTFCSVGEWLQAIKMERYKDNFTAAGYNSLESVARMTIEDVMSLGITLVGHQKKIMSSIQTMRAQMLHLHGTGIQV

SEQ ID NO: 197 - protein, 1005 aa, Homo sapiens
  ref <308>: DATABASE ACCESSION NUMBER: GenBank No. NP065387
  ref <309>: DATABASE ENTRY DATE: 2004-11-16
MAPARGRLPPALWVVTAAAAAATCVSAARGEVNLLDTSTIHGDWGWLTYPAHGWDSINEVDESFQPIHTYQVCNVMSPNQNNWLRTSWVPRDGARRVYAEIKFTLRDCNSMPGVLGTCKETFNLYYLESDRDLGASTQESQFLKIDTIAADESFTGADLGVRRLKLNTEVRSVGPLSKRGFYLAFQDIGACLAILSLRIYYKKCPAMVRNLAAFSEAVTGADSSSLVEVRGQCVRHSEERDTPKMYCSAEGEWLVPIGKCVCSAGYEERRDACVACELGFYKSAPGDQLCARCPPHSHSAAPAAQACHCDLSYYRAALDPPSSACTRPPSAPVNLISSVNGTSVTLEWAPPLDPGGRSDITYNAVCRRCPWALSRCEACGSGTRFVPQQTSLVQASLLVANLLAHMNYSFWIEAVNGVSDLSPEPRRAAVVNITTNQAAPSQVVVIRQERAGQTSVSLLWQEPEQPNGIILEYEIKYYEKDKEMQSYSTLKAVTTRATVSGLKPGTRYVFQVRARTSAGCGRFSQAMEVETGKPRPRYDTRTIVWICLTLITGLVVLLLLLICKKRHCGYSKAFQDSDEEKMHYQNGQAPPPVFLPLHHPPGKLPEPQFYAEPHTYEEPGRAGRSFTREIEASRIHIEKIIGSGDSGEVCYGRLRVPGQRDVPVAIKALKAGYTERQRRDFLSEASIMGQFDHPNIIRLEGVVTRGRLAMIVTEYMENGSLDTFLRTHDGQFTIMQLVGMLRGVGAGMRYLSDLGYVHRDLAARNVLVDSNLVCKVSDFGLSRVLEDDPDAAYTTTGGKIPIRWTAPEAIAFRTFSSASDVWSFGVVMWEVLAYGERPYWNMTNRDVISSVEEGYRLPAPMGCPHALHQLMLDCWHKDRAQRPRFSQIVSVLDALIRSPESLRATATVSRCPPPAFVRSCFDLRGGSGGGGGLTVGDWLDSIRMGRYRDHFAAGGYSSLGMVLRMNAQDVRALGITLMGHQKKILGSIQTMRAQLTSTQGPRRHL

SEQ ID NO: 198 - protein, 984 aa, Homo sapiens
  ref <308>: DATABASE ACCESSION NUMBER: GenBank No. NP004432
  ref <309>: DATABASE ENTRY DATE: 2004-11-15
MALDYLLLLLLASAVAAMEETLMDTRTATAELGWTANPASGWEEVSGYDENLNTIRTYQVCNVFEPNQNNWLLTTFINRRGAHRIYTEMRFTVRDCSSLPNVPGSCKETFNLYYYETDSVIATKKSAFWSEAPYLKVDTIAADESFSQVDFGGRLMKVNTEVRSFGPLTRNGFYLAFQDYGACMSLLSVRVFFKKCPSIVQNFAVFPETMTGAESTSLVIARGTCIPNAEEVDVPIKLYCNGDGEWMVPIGRCTCKPGYEPENSVACKACPAGTFKASQEAEGCSHCPSNSRSPAEASPICTCRTGYYRADFDPPEVACTSVPSGPRNVISIVNETSIILEWHPPRETGGRDDVTYNIICKKCRADRRSCSRCDDNVEFVPRQLGLTECRVSISSLWAHTPYTFDIQAINGVSSKSPFPPQHVSVNITTNQAAPSTVPIMHQVSATMRSITLSWPQPEQPNGIILDYEIRYYEKEHNEFNSSMARSQTNTARIDGLRPGMVYVVQVRARTVAGYGKFSGKMCFQTLTDDDYKSELREQLPLIAGSAAAGVVFVVSLVAISIVCSRKRAYSKEAVYSDKLQHYSTGRGSPGMKIYIDPFTYEDPNEAVREFAKEIDVSFVKIEEVIGAGEFGEVYKGRLKLPGKREIYVAIKTLKAGYSEKQRRDFLSEASIMGQFDHPNIIRLEGVVTKSRPVMIITEFMENGALDSFLRQNDGQFTVIQLVGMLRGIAAGMKYLAEMNYVHRDLAARNILVNSNLVCKVSDFGLSRYLQDDTSDPTYTSSLGGKIPVRWTAPEAIAYRKFTSASDVWSYGIVMWEVMSFGERPYWDMSNQDVINAIEQDYRLPPPMDCPAALHQLMLDCWQKDRNSRPRFAEIVNTLDKMIRNPASLKTVATITAVPSQPLLDRSIPDFTAFTTVDDWLSAIKMVQYRDSFLTAGFTSLQLVTQMTSEDLLRIGITLAGHQKKILNSIHSMRVQISQSPTAMA

SEQ ID NO: 199 - protein, 1055 aa, Homo sapiens
  ref <308>: DATABASE ACCESSION NUMBER: GenBank No. AAB94602
  ref <309>: DATABASE ENTRY DATE: 2000-11-29
MALRRLGAALLLLPLLAAVEETLMDSTTATAELGWMVHPPSGWEEVSGYDENMNTIRTYQVCNVFESSQNNWLRTKFIRRRGAHRIHVEMKFSVRDCSSIPSVPGSCKETFNLYYYEADFDSATKTFPNWMENPWVKVDTIAADESFSQVDLGGRVMKINTEVRSFGPVSRSGFYLAFQDYGGCMSLIAVRVFYRKCPRIIQNGAIFQETLSGAESTSLVAARGSCIANAEEVDVPIKLYCNGDGEWLVPIGRCMCKAGFEAVENGTVCRGCPSGTFKANQGDEACTHCPINSRTTSEGATNCVCRNGYYRADLDPLDMPCTTIPSAPQAVISSVNETSLMLEWTPPRDSGGREDLVYNIICKSCGSGRGACTRCGDNVQYAPRQLGLTEPRIYISDLLAHTQYTFEIQAVNGVTDQSPFSPQFASVNITTNQAAPSAVSIMHQVSRTVDSITLSWSQPDQPNGVILDYELQYYEKELSEYNATAIKSPTNTVTVQGLKAGAIYVFQVRARTVAGYGRYSGKMYFQTMTEAEYQTSIQEKLPLIIGSSAAGLVFLIAVVVIAIVCNRRGFERADSEYTDKLQHYTSGHMTPGMKIYIDPFTYEDPNEAVREFAKEIDISCVKIEQVIGAGEFGEVCSGHLKLPGKREIFVAIKTLKSGYTEKQRRDFLSEASIMGQFDHPNVIHLEGVVTKSTPVMIITEFMENGSLDSFLRQNDGQFTVIQLVGMLRGIAAGMKYLADMNYVHRDLAARNILVNSNLVCKVSDFGLSRFLEDDTSDPTYTSALGGKIPIRWTAPEAIQYRKFTSASDVWSYGIVMWEVMSYGERPYWDMTNQDVINAIEQDYRLPPPMDCPSALHQLMLDCWQKDRNHRPKFGQIVNTLDKMIRNPNSLKAMAPLSSGINLPLLDRTIPDYTSFNTVDEWLEAIKMGQYKESFANAGFTSFDVVSQMMMEDILRVGVTLAGHQKKILNSIQVMRAQMNQIQSVEGQPLARRPRATGRTKRCQPRDVTKKTCNSNDGKKKGMGKKKTDPGRGREIQGIFFKEDSHKESNDCSCGG

SEQ ID NO: 200 - protein, 998 aa, Homo sapiens
  ref <308>: DATABASE ACCESSION NUMBER: GenBank No. NP004434
  ref <309>: DATABASE ENTRY DATE: 2004-11-16
MARARPPPPPSPPPGLLPLLPPLLLLPLLLLPAGCRALEETLMDTKWVTSELAWTSHPESGWEEVSGYDEAMNPIRTYQVCNVRESSQNNWLRTGFIWRRDVQRVYVELKFTVRDCNSIPNIPGSCKETFNLFYYEADSDVASASSPFWMENPYVKVDTIAPDESFSRLDAGRVNTKVRSFGPLSKAGFYLAFQDQGACMSLISVRAFYKKCASTTAGFALFPETLTGAEPTSLVIAPGTCIPNAVEVSVPLKLYCNGDGEWMVPVGACTCATGHEPAAKESQCRPCPPGSYKAKQGEGPCLPCPPNSRTTSPAASICTCHNNFYRADSDSADSACTTVPSPPRGVISNVNETSLILEWSEPRDLGGRDDLLYNVICKKCHGAGGASACSRCDDNVEFVPRQLGLTERRVHISHLLAHTRYTFEVQAVNGVSGKSPLPPRYAAVNITTNQAAPSEVPTLRLHSSSGSSLTLSWAPPERPNGVILDYEMKYFEKSEGIASTVTSQMNSVQLDGLRPDARYVVQVRARTVAGYGQYSRPAEFETTSERGSGAQQLQEQLPLIVGSATAGLVFVVAVVVIAIVCLRKQRHGSDSEYTEKLQQYIAPGMKVYIDPFTYEDPNEAVREFAKEIDVSCVKIEEVIGAGEFGEVCRGRLKQPGRREVFVAIKTLKVGYTERQRRDFLSEASIMGQFDHPNIIRLEGVVTKSRPVMILTEFMENCALDSFLRLNDGQFTVIQLVGMLRGIAAGMKYLSEMNYVHRDLAARNILVNSNLVCKVSDFGLSRFLEDDPSDPTYTSSLGGKIPIRWTAPEAIAYRKFTSASDVWSYGIVMWEVMSYGERPYWDMSNQDVINAVEQDYRLPPPMDCPTALHQLMLDCWVRDRNLRPKFSQIVNTLDKLIRNAASLKVIASAQSGMSQPLLDRTVPDYTTFTTVGDWLDAIKMGRYKESFVSAGFASFDLVAQMTAEDLLRIGVTLAGHQKKILSSIQDMRLQMNQTLPVQV

SEQ ID NO: 201 - protein, 987 aa, Homo sapiens
  ref <308>: DATABASE ACCESSION NUMBER: GenBank No.NP004435
  ref <309>: DATABASE ENTRY DATE: 2004-11-16
MELRVLLCWASLAAALEETLLNTKLETADLKWVTFPQVDGQWEELSGLDEEQHSVRTYEVCDVQRAPGQAHWLRTGWVPRRGAVHVYATLRFTMLECLSLPRAGRSCKETFTVFYYESDADTATALTPAWMENPYIKVDTVAAEHLTRKRPGAEATGKVNVKTLRLGPLSKAGFYLAFQDQGACMALLSLHLFYKKCAQLTVNLTRFPETVPRELVVPVAGSCVVDAVPAPGPSPSLYCREDGQWAEQPVTGCSCAPGFEAAEGNTKCRACAQGTFKPLSGEGSCQPCPANSHSNTIGSAVCQCRVGYFRARTDPRGAPCTTPPSAPRSVVSRLNGSSLHLEWSAPLESGGREDLTYALRCRECRPGGSCAPCGGDLTFDPGPRDLVEPWVVVRGLRPDFTYTFEVTALNGVSSLATGPVPFEPVNVTTDREVPPAVSDIRVTRSSPSSLSLAWAVPRAPSGAVLDYEVKYHEKGAEGPSSVRFLKTSENRAELRGLKRGASYLVQVRARSEAGYGPFGQEHHSQTQLDESEGWREQLALIAGTAVVGVVLVLVVIVVAVLCLRKQSNGREAEYSDKHGQYLIGHGTKVYIDPFTYEDPNEAVREFAKEIDVSYVKIEEVIGAGEFGEVCRGRLKAPGKKESCVAIKTLKGGYTERQRREFLSEASIMGQFEHPNIIRLEGVVTNSMPVMILTEFMENGALDSFLRLNDGQFTVIQLVGMLRGIASGMRYLAEMSYVHRDLAARNILVNSNLVCKVSDFGLSRFLEENSSDPTYTSSLGGKIPIRWTAPEAIAFRKFTSASDAWSYGIVMWEVMSFGERPYWDMSNQDVINAIEQDYRLPPPPDCPTSLHQLMLDCWQKDRNARPRFPQVVSALDKMIRNPASLKIVARENGGASHPLLDQRQPHYSAFGSVGEWLRAIKMGRYEESFAAAGFGSFELVSQISAEDLLRIGVTLAGHQKKILASVQHMKSQAKPGTPGGTGGPAPQY

SEQ ID NO: 202 - protein, 1006 aa, Homo sapiens
  ref <308>: DATABASE ACCESSION NUMBER: GenBank No.NP004436
  ref <309>: DATABASE ENTRY DATE: 2004-11-29
MVCSLWVLLLVSSVLALEEVLLDTTGETSEIGWLTYPPGGWDEVSVLDDQRRLTRTFEACHVAGAPPGTGQDNWLQTHFVERRGAQRAHIRLHFSVRACSSLGVSGGTCRETFTLYYRQAEEPDSPDSVSSWHLKRWTKVDTIAADESFPSSSSSSSSSSSAAWAVGPHGAGQRAGLQLNVKERSFGPLTQRGFYVAFQDTGACLALVAVRLFSYTCPAVLRSFASFPETQASGAGGASLVAAVGTCVAHAEPEEDGVGGQAGGSPPRLHCNGEGKWMVAVGGCRCQPGYQPARGDKACQACPRGLYKSSAGNAPCSPCPARSHAPNPAAPVCPCLEGFYRASSDPPEAPCTGPPSAPQELWFEVQGSALMLHWRLPRELGGRGDLLFNVVCKECEGRQEPASGGGGTCHRCRDEVHFDPRQRGLTESRVLVGGLRAHVPYILEVQAVNGVSELSPDPPQAAAINVSTSHEVPSAVPVVHQVSRASNSITVSWPQPDQTNGNILDYQLRYYDQAEDESHSFTLTSETNTATVTQLSPGHIYGFQVRARTAAGHGPYGGKVYFQTLPQGELSSQLPERLSLVIGSILGALAFLLLAAITVLAVVFQRKRRGTGYTEQLQQYSSPGLGVKYYIDPSTYEDPCQAIRELAREVDPAYIKIEEVIGTGSFGEVRQGRLQPRGRREQTVAIQALWAGGAESLQMTFLGRAAVLGQFQHPNILRLEGVVTKSRPLMVLTEFMELGPLDSFLRQREGQFSSLQLVAMQRGVAAAMQYLSSFAFVHRSLSAHSVLVNSHLVCKVARLGHSPQGPSCLLRWAAPEVIAHGKHTTSSDVWSFGILMWEVMSYGERPYWDMSEQEVLNAIEQEFRLPPPPGCPPGLHLLMLDTWQKDRARRPHFDQLVAAFDKMIRKPDTLQAGGDPGERPSQALLTPVALDFPCLDSPQAWLSAIGLECYQDNFSKFGLCTFSDVAQLSLEDLPALGITLAGHQKKLLHHIQLLQQHLRQQGSVEV

SEQ ID NO: 203 - protein, 1255 aa, Homo sapiens [sequence omitted]

SEQ ID NO: 204 - protein, 1342 aa, Homo sapiens
  ref <308>: DATABASE ACCESSION NUMBER: GenBank No. NP001973
  ref <309>: DATABASE ENTRY DATE: 2004-12-20
MRANDALQVLGLLFSLARGSEVGNSQAVCPGTLNGLSVTGDAENQYQTLYKLYERCEVVMGNLEIVLTGHNADLSFLQWIREVTGYVLVAMNEFSTLPLPNLRVVRGTQVYDGKFAIFVMLNYNTNSSHALRQLRLTQLTEILSGGVYIEKNDKLCHMDTIDWRDIVRDRDAEIVVKDNGRSCPPCHEVCKGRCWGPGSEDCQTLTKTICAPQCNGHCFGPNPNQCCHDECAGGCSGPQDTDCFACRHFNDSGACVPRCPQPLVYNKLTFQLEPNPHTKYQYGGVCVASCPHNFVVDQTSCVRACPPDKMEVDKNGLKMCEPCGGLCPKACEGTGSGSRFQTVDSSNIDGFVNCTKILGNLDFLITGLNGDPWHKIPALDPEKLNVFRTVREITGYLNIQSWPPHMHNFSVFSNLTTIGGRSLYNRGFSLLIMKNLNVTSLGFRSLKEISAGRIYISANRQLCYHHSLNWTKVLRGPTEERLDIKHNRPRRDCVAEGKVCDPLCSSGGCWGPGPGQCLSCRNYSRGGVCVTHCNFLNGEPREFAHEAECFSCHPECQPMEGTATCNGSGSDTCAQCAHFRDGPHCVSSCPHGVLGAKGPIYKYPDVQNECRPCHENCTQGCKGPELQDCLGQTLVLIGKTHLTMALTVIAGLVVIFMMLGGTFLYWRGRRIQNKRAMRRYLERGESIEPLDPSEKANKVLARIFKETELRKLKVLGSGVFGTVHKGVWIPEGESIKIPVCIKVIEDKSGRQSFQAVTDHMLAIGSLDHAHIVRLLGLCPGSSLQLVTQYLPLGSLLDHVRQHRGALGPQLLLNWGVQIAKGMYYLEEHGMVHRNLAARNVLLKSPSQVQVADFGVADLLPPDDKQLLYSEAKTPIKWMALESIHFGKYTHQSDVWSYGVTVWELMTFGAEPYAGLRLAEVPDLLEKGERLAQPQICTIDVYMVMVKCWMIDENIRPTFKELANEFTRMARDPPRYLVIKRESGPGIAPGPEPHGLTNKKLEEVELEPELDLDLDLEAEEDNLATTTLGSALSLPVGTLNRPRGSQSLLSPSSGYMPMNQGNLGESCQESAVSGSSERCPRPVSLHPMPRGCLASESSEGHVTGSEAELQEKVSMCRSRSRSRSPRPRGDSAYHSQRHSLLTPVTPLSPPGLEEEDVNGYVMPDTHLKGTPSSREGTLSSVGLSSVLGTEEEDEDEEYEYMNRRRRHSPPHPPRPSSLEELGYEYMDVGSDLSASLGSTQSCPLHPVPIMPTAGTTPDEDYEYMNRQRDGGGPGGDYAAMGACPASEQGYEEMRAFQGPGHQAPHVHYARLKTLRSLEATDSAFDNPDYWHSRLFPKANAQRT

SEQ ID NO: 205 - protein, 820 aa, Homo sapiens [sequence omitted]

SEQ ID NO: 206 - protein, 821 aa, Homo sapiens
  ref <308>: DATABASE ACCESSION NUMBER: GenBank No. NP000132
  ref <309>: DATABASE ENTRY DATE: 2004-12-20
MVSWGRFICLVVVTMATLSLARPSFSLVEDTTLEPEEPPTKYQISQPEVYVAAPGESLEVRCLLKDAAVISWTKDGVHLGPNNRTVLIGEYLQIKGATPRDSGLYACTASRTVDSETWYFMVNVTDAISSGDDEDDTDGAEDFVSENSNNKRAPYWTNTEKMEKRLHAVPAANTVKFRCPAGGNPMPTMRWLKNGKEFKQEHRIGGYKVRNQHWSLIMESVVPSDKGNYTCVVENEYGSINHTYHLDVVERSPHRPILQAGLPANASTVVGGDVEFVCKVYSDAQPHIQWIKHVEKNGSKYGPDGLPYLKVLKAAGVNTTDKEIEVLYIRNVTFEDAGEYTCLAGNSIGISFHSAWLTVLPAPGREKEITASPDYLEIAIYCIGVFLIACMVVTVILCRMKNTTKKPDFSSQPAVHKLTKRIPLRRQVTVSAESSSSMNSNTPLVRITTRLSSTADTPMLAGVSEYELPEDPKWEFPRDKLTLGKPLGEGCFGQVVMAEAVGIDKDKPKEAVTVAVKMLKDDATEKDLSDLVSEMEMMKMIGKHKNIINLLGACTQDGPLYVIVEYASKGNLREYLRARRPPGMEYSYDINRVPEEQMTFKDLVSCTYQLARGMEYLASQKCIHRDLAARNVLVTENNVMKIADFGLARDINNIDYYKKTTNGRLPVKWMAPEALFDRVYTHQSDVWSFGVLMWEIFTLGGSPYPGIPVEELFKLLKEGHRMDKPANCTNELYMMMRDCWHAVPSQRPTFKQLVEDLDRILTLTTNEEYLDLSQPLEQYSPSYPDTRSSCSSGDDSVFSPDPMPYEPCLPQYPHINGSVKT

SEQ ID NO: 207 - protein, 806 aa, Homo sapiens
  ref <308>: DATABASE ACCESSION NUMBER: GenBank No. NP000133
  ref <309>: DATABASE ENTRY DATE: 2004-12-20
MGAPACALALCVAVAIVAGASSESLGTEQRVVGRAAEVPGPEPGQQEQLVFGSGDAVELSCPPPGGGPMGPTVWVKDGTGLVPSERVLVGPQRLQVLNASHEDSGAYSCRQRLTQRVLCHFSVRVTDAPSSGDDEDGEDEAEDTGVDTGAPYWTRPERMDKKLLAVPAANTVRFRCPAAGNPTPSISWLKNGREFRGEHRIGGIKLRHQQWSLVMESVVPSDRGNYTCVVENKFGSIRQTYTLDVLERSPHRPILQAGLPANQTAVLGSDVEFHCKVYSDAQPHIQWLKHVEVNGSKVGPDGTPYVTVLKTAGANTTDKELEVLSLHNVTFEDAGEYTCLAGNSIGFSHHSAWLVVLPAEEELVEADEAGSVYAGILSYGVGFFLFILVVAAVTLCRLRSPPKKGLGSPTVHKISRFPLKRQVSLESNASMSSNTPLVRIARLSSGEGPTLANVSELELPADPKWELSRARLTLGKPLGEGCFGQVVMAEAIGIDKDRAAKPVTVAVKMLKDDATDKDLSDLVSEMEMMKMIGKHKNIINLLGACTQGGPLYVLVEYAAKGNLREFLRARRPPGLDYSFDTCKPPEEQLTFKDLVSCAYQVARGMEYLASQKCIHRDLAARNVLVTEDNVMKIADFGLARDVHNLDYYKKTTNGRLPVKWMAPEALFDRVYTHQSDVWSFGVLLWEIFTLGGSPYPGIPVEELFKLLKEGHRMDKPANCTHDLYMIMRECWHAAPSQRPTFKQLVEDLDRVLTVTSTDEYLDLSAPFEQYSPGGQDTPSSSSSGDDSVFAHDLLPPAPPSSGGSRT

SEQ ID NO: 208 - protein, 802 aa, Homo sapiens
  ref <308>: DATABASE ACCESSION NUMBER: GenBank No. NP002002
  ref <309>: DATABASE ENTRY DATE: 2004-10-28
MRLLLALLGVLLSVPGPPVLSLEASEEVELEPCLAPSLEQQEQELTVALGQPVRLCCGRAERGGHWYKEGSRLAPAGRVRGWRGRLEIASFLPEDAGRYLCLARGSMIVLQNLTLITGDSLTSSNDDEDPKSHRDPSNRHSYPQQAPYWTHPQRMEKKLHAVPAGNTVKFRCPAAGNPTPTIRWLKDGQAFHGENRIGGIRLRHQHWSLVMESVVPSDRGTYTCLVENAVGSIRYNYLLDVLERSPHRPILQAGLPANTTAVVGSDVELLCKVYSDAQPHIQWLKHIVINGSSFGADGFPYVQVLKTADINSSEVEVLYLRNVSAEDAGEYTCLAGNSIGLSYQSAWLTVLPEEDPTWTAAAPEARYTDIILYASGSLALAVLLLLAGLYRGQALHGRHPRPPATVQKLSRFPLARQFSLESGSSGKSSSSLVRGVRLSSSGPALLAGLVSLDLPLDPLWEFPRDRLVLGKPLGEGCFGQVVRAEAFGMDPARPDQASTVAVKMLKDNASDKDLADLVSEMEVMKLIGRHKNIINLLGVCTQEGPLYVIVECAAKGNLREFLRARRPPGPDLSPDGPRSSEGPLSFPVLVSCAYQVARGMQYLESRKCIHRDLAARNVLVTEDNVMKIADFGLARGVHHIDYYKKTSNGRLPVKWMAPEALFDRVYTHQSDVWSFGILLWEIFTLGGSPYPGIPVEELFSLLREGHRMDRPPHCPPELYGLMRECWHAAPSQRPTFKQLVEALDKVLLAVSEEYLDLRLTFGPYSPSGGDASSTCSSSDSVFSHDPLPLGSSSFPFGSGVQT

SEQ ID NO: 209 - protein, 993 aa, Homo sapiens
  ref <308>: DATABASE ACCESSION NUMBER: GenBank No. NP004110
  ref <309>: DATABASE ENTRY DATE: 2005-01-22
MPALARDAGTVPLLVVFSAMIFGTITNQDLPVIKCVLINHKNNDSSVGKSSSYPMVSESPEDLGCALRPQSSGTVYEAAAVEVDVSASITLQVLVDAPGNISCLWVFKHSSLNCQPHFDLQNRGVVSMVILKMTETQAGEYLLFIQSEATNYTILFTVSIRNTLLYTLRRPYFRKMENQDALVCISESVPEPIVEWVLCDSQGESCKEESPAVVKKEEKVLHELFGTDIRCCARNELGRECTRLFTIDLNQTPQTTLPQLFLKVGEPLWIRCKAVHVNHGFGLTWELENKALEEGNYFEMSTYSTNRTMIRILFAFVSSVARNDTGYYTCSSSKHPSQSALVTIVGKGFINATNSSEDYEIDQYEEFCFSVRFKAYPQIRCTWTFSRKSFPCEQKGLDNGYSISKFCNHKHQPGEYIFHAENDDAQFTKMFTLNIRRKPQVLAEASASQASCFSDGYPLPSWTWKKCSDKSPNCTEEITEGVWNRKANRKVFGQWVSSSTLNMSEAIKGFLVKCCAYNSLGTSCETILLNSPGPFPFIQDNISFYATIGVCLLFIVVLTLLICHKYKKQFRYESQLQMVQVTGSSDNEYFYVDFREYEYDLKWEFPRENLEFGKVLGSGAFGKVMNATAYGISKTGVSIQVAVKMLKEKADSSEREALMSELKMMTQLGSHENIVNLLGACTLSGPIYLIFEYCCYGDLLNYLRSKREKFHRTWTEIFKEHNFSFYPTFQSHPNSSMPGSREVQIHPDSDQISGLHGNSFHSEDEIEYENQKRLEEEEDLNVLTFEDLLCFAYQVAKGMEFLEFKSCVHRDLAARNVLVTHGKVVKICDFGLARDIMSDSNYVVRGNARLPVKWMAPESLFEGIYTIKSDVWSYGILLWEIFSLGVNPYPGIPVDANFYKLIQNGFKMDQPFYATEEIYIIMQSCWAFDSRKRPSFPNLTSFLGCQLADAEEAMYQNVDGRVSECPHTYQNRRPFSREMDLGLLSPQAQVEDS

SEQ ID NO: 210 - protein, 1363 aa, Homo sapiens
  ref <308>: DATABASE ACCESSION NUMBER: GenBank No. NP000213
  ref <309>: DATABASE ENTRY DATE: 2004-12-20
MQRGAALCLRLWLCLGLLDGLVSDYSMTPPTLNITEESHVIDTGDSLSISCRGQHPLEWAWPGAQEAPATGDKDSEDTGVVRDCEGTDARPYCKVLLLHEVHANDTGSYVCYYKYIKARIEGTTAASSYVFVRDFEQPFINKPDTLLVNRKDAMWVPCLVSIPGLNVTLRSQSSVLWPDGQEVVWDDRRGMLVSTPLLHDALYLQCETTWGDQDFLSNPFLVHITGNELYDIQLLPRKSLELLVGEKLVLNCTVWAEFNSGVTFDWDYPGKQAERGKWVPERRSQQTHTELSSILTIHNVSQHDLGSYVCKANNGIQRFRESTEVIVHENPFISVEWLKGPILEATAGDELVKLPVKLAAYPPPEFQWYKDGKALSGRHSPHALVLKEVTEASTGTYTLALWNSAAGLRRNISLELVVNVPPQIHEKEASSPSIYSRHSRQALTCTAYGVPLPLSIQWHWRPWTPCKMFAQRSLRRRQQQDLMPQCRDWRAVTTQDAVNPIESLDTWTEFVEGKNKTVSKLVIQNANVSAMYKCVVSNKVGQDERLIYFYVTTIPDGFTIESKPSEELLEGQPVLLSCQADSYKYEHLRWYRLNLSTLHDAHGNPLLLDCKNVHLFATPLAASLEEVAPGARHATLSLSIPRVAPEHEGHYVCEVQDRRSHDKHCHKKYLSVQALEAPRLTQNLTDLLVNVSDSLEMQCLVAGAHAPSIVWYKDERLLEEKSGVDLADSNQKLSIQRVREEDAGPYLCSVCRPKGCVNSSASVAVEGSEDKGSMEIVILVGTGVIAVFFWVLLLLIFCNMRRPAHADIKTGYLSIIMDPGEVPLEEQCEYLSYDASQWEFPRERLHLGRVLGYGAFGKVVEASAFGIHKGSSCDTVAVKMLKEGATASEQRALMSELKILIHIGNHLNVVNLLGACTKPQGPLMVIVEFCKYGNLSNFLRAKRDAFSPCAEKSPEQRGRFRAMVELARLDRRRPGSSDRVLFARFSKTEGGARRASPDQEAEDLWLSPLTMEDLVCYSFQVARGMEFLASRKCIHRDLAARNILLSESDVVKICDFGLARDIYKDPDYVRKGSARLPLKWMAPESIFDKVYTTQSDVWSFGVLLWEIFSLGASPYPGVQINEEFCQRVRDGTRMRAPELATPAIRHIMLNCWSGDPKARPAFSELVEILGDLLQGRGLQEEEEVCMAPRSSQSSEEGSFSQVSTMALHIAQADAEDSPPSLQRHSLAARYYNWVSFPGCLARGAETRGSSRMKTFEEFPMTPTTYKGSVDNQTDSGMVLASEEFEQIESRHRQESGFSCKGPGQNVAVTRAHPDSQGRRRRPERGARGGQVFYNSEYGELSEPSEEDHCSPSARVTFFTDNSY

SEQ ID NO: 211 - protein, 1390 aa, Homo sapiens
  ref <308>: DATABASE ACCESSION NUMBER: GenBank No. NP000236
  ref <309>: DATABASE ENTRY DATE: 2004-10-28
MKAPAVLAPGILVLLFTLVQRSNGECKEALAKSEMNVNMKYQLPNFTAETPIQNVILHEHHIFLGATNYIYVLNEEDLQKVAEYKTGPVLEHPDCFPCQDCSSKANLSGGVWKDNINMALVVDTYYDDQLISCGSVNRGTCQRHVFPHNHTADIQSEVHCIFSPQIEEPSQCPDCVVSALGAKVLSSVKDRFINFFVGNTINSSYFPDHPLHSISVRRLKETKDGFMFLTDQSYIDVLPEFRDSYPIKYVHAFESNNFIYFLTVQRETLDAQTFHTRIIRFCSINSGLHSYMEMPLECILTEKRKKRSTKKEVFNILQAAYVSKPGAQLARQIGASLNDDILFGVFAQSKPDSAEPMDRSAMCAFPIKYVNDFFNKIVNKNNVRCLQHFYGPNHEHCFNRTLLRNSSGCEARRDEYRTEFTTALQRVDLFMGQFSEVLLTSISTFIKGDLTIANLGTSEGRFMQVVVSRSGPSTPHVNFLLDSHPVSPEVIVEHTLNQNGYTLVITGKKITKIPLNGLGCRHFQSCSQCLSAPPFVQCGWCHDKCVRSEECLSGTWTQQICLPAIYKVFPNSAPLEGGTRLTICGWDFGFRRNNKFDLKKTRVLLGNESCTLTLSESTMNTLKCTVGPAMNKHFNMSIIISNGHGTTQYSTFSYVDPVITSISPKYGPMAGGTLLTLTGNYLNSGNSRHISIGGKTCTLKSVSNSILECYTPAQTISTEFAVKLKIDLANRETSIFSYREDPIVYEIHPTKSFISGGSTITGVGKNLNSVSVPRMVINVHEAGRNFTVACQHRSNSEIICCTTPSLQQLNLQLPLKTKAFFMLDGILSKYFDLIYVHNPVFKPFEKPVMISMGNENVLEIKGNDIDPEAVKGEVLKVGNKSCENIHLHSEAVLCTVPNDLLKLNSELNIEWKQAISSTVLGKVIVQPDQNFTGLIAGVVSISTALLLLLGFFLWLKKRKQIKDLGSELVRYDARVHTPHLDRLVSARSVSPTTEMVSNESVDYRATFPEDQFPNSSQNGSCRQVQYPLTDMSPILTSGDSDISSPLLQNTVHIDLSALNPELVQAVQHVVIGPSSLIVHFNEVIGRGHFGCVYHGTLLDNDGKKIHCAVKSLNRITDIGEVSQFLTEGIIMKDFSHPNVLSLLGICLRSEGSPLVVLPYMKHGDLRNFIRNETHNPTVKDLIGFGLQVAKGMKYLASKKFVHRDLAARNCMLDEKFTVKVADFGLARDMYDKEYYSVHNKTGAKLPVKWMALESLQTQKFTTKSDVWSFGVLLWELMTRGAPPYPDVNTFDITVYLLQGRRLLQPEYCPDPLYEVMLKCWHPKAEMRPSFSELVSRISAIFSTFIGEHYVHVNATYVNVKCVAPYPSLLSSEDNADDEVDTRPASFWETS

SEQ ID NO: 212 - protein, 1089 aa, Homo sapiens
  ref <308>: DATABASE ACCESSION NUMBER: GenBank No. NP006197
  ref <309>: DATABASE ENTRY DATE: 2004-10-26
MGTSHPAFLVLGCLLTGLSLILCQLSLPSILPNENEKVVQLNSSFSLRCFGESEVSWQYPMSEEESSDVEIRNEENNSGLFVTVLEVSSASAAHTGLYTCYYNHTQTEENELEGRHIYIYVPDPDVAFVPLGMTDYLVIVEDDDSAIIPCRTTDPETPVTLHNSEGVVPASYDSRQGFNGTFTVGPYICEATVKGKKFQTIPFNVYALKATSELDLEMEALKTVYKSGETIVVTCAVFNNEVVDLQWTYPGEVKGKGITMLEEIKVPSIKLVYTLTVPEATVKDSGDYECAARQATREVKEMKKVTISVHEKGFIEIKPTFSQLEAVNLHEVKHFVVEVRAYPPPRISWLKNNLTLIENLTEITTDVEKIQEIRYRSKLKLIRAKEEDSGHYTIVAQNEDAVKSYTFELLTQVPSSILDLVDDHHGSTGGQTVRCTAEGTPLPDIEWMICKDIKKCNNETSWTILANNVSNIITEIHSRDRSTVEGRVTFAKVEETIAVRCLAKNLLGAENRELKLVAPTLRSELTVAAAVLVLLVIVIISLIVLVVIWKQKPRYEIRWRVIESISPDGHEYIYVDPMQLPYDSRWEFPRDGLVLGRVLGSGAFGKVVEGTAYGLSRSQPVMKVAVKMLKPTARSSEKQALMSELKIMTHLGPHLNIVNLLGACTKSGPIYIITEYCFYGDLVNYLHKNRDSFLSHHPEKPKKELDIFGLNPADESTRSYVILSFENNGDYMDMKQADTTQYVPMLERKEVSKYSDIQRSLYDRPASYKKKSMLDSEVKNLLSDDNSEGLTLLDLLSFTYQVARGMEFLASKNCVHRDLAARNVLLAQGKIVKICDFGLARDIMHDSNYVSKGSTFLPVKWMAPESIFDNLYTTLSDVWSYGILLWEIFSLGGTPYPGMMVDSTFYNKIKSGYRMAKPDHATSEVYEIMVKCWNSEPEKRPSFYHLSEIVENLLPGQYKKSYEKIHLDFLKSDHPAVARMRVDSDNAYIGVTYKNEEDKLKDWEGGLDEQRLSADSGYIIPLPDIDPVPEEEDLGKRNRHSSQTSEESAIETGSSSSTFIKREDETIEDIDMMDDIGIDSSDLVEDSFL

SEQ ID NO: 213 - protein, 1106 aa, Homo sapiens
  ref <308>: DATABASE ACCESSION NUMBER: GenBank No. NP002600
  ref <309>: DATABASE ENTRY DATE: 2004-10-26
MRLPGAMPALALKGELLLLSLLLLLEPQISQGLVVTPPGPELVLNVSSTFVLTCSGSAPVVWERMSQEPPQEMAKAQDGTFSSVLTLTNLTGLDTGEYFCTHNDSRGLETDERKRLYIFVPDPTVGFLPNDAEELFIFLTEITEITIPCRVTDPQLVVTLHEKKGDVALPVPYDHQRGFSGIFEDRSYICKTTIGDREVDSDAYYVYRLQVSSINVSVNAVQTVVRQGENITLMCIVIGNEVVNFEWTYPRKESGRLVEPVTDFLLDMPYHIRSILHIPSAELEDSGTYTCNVTESVNDHQDEKAINITVVESGYVRLLGEVGTLQFAELHRSRTLQVVFEAYPPPTVLWFKDNRTLGDSSAGEIALSTRNVSETRYVSELTLVRVKVAEAGHYTMRAFHEDAEVQLSFQLQINVPVRVLELSESHPDSGEQTVRCRGRGMPQPNIIWSACRDLKRCPRELPPTLLGNSSEEESQLETNVTYWEEEQEFEVVSTLRLQHVDRPLSVRCTLRNAVGQDTQEVIVVPHSLPFKVVVISAILALVVLTIISLIILIMLWQKKPRYEIRWKVIESVSSDGHEYIYVDPMQLPYDSTWELPRDQLVLGRTLGSGAFGQVVEATAHGLSHSQATMKVAVKMLKSTARSSEKQALMSELKIMSHLGPHLNVVNLLGACTKGGPIYIITEYCRYGDLVDYLHRNKHTFLQHHSDKRRPPSAELYSNALPVGLPLPSHVSLTGESDGGYMDMSKDESVDYVPMLDMKGDVKYADIESSNYMAPYDNYVPSAPERTCRATLINESPVLSYMDLVGFSYQVANGMEFLASKNCVHRDLAARNVLICEGKLVKICDFGLARDIMRDSNYISKGSTFLPLKWMAPESIFNSLYTTLSDVWSFGILLWEIFTLGGTPYPELPMNEQFYNAIKRGYRMAQPAHASDEIYEIMQKCWEEKFEIRPPFSQLVLLLERLLGEGYKKKYQQVDEEFLRSDHPAILRSQARLPGFHGLRSPLDTSSVLYTAVQPNEGDNDYIIPLPDPKPEVADEGPLEGSPSLASSTLNEVNTSSTISCDSPLEPQDEPEPEPQLELQVEPEPELEQLPDSGCPAPRAEAEDSFL

SEQ ID NO: 214 - protein, 1400 aa, Homo sapiens
  ref <308>: DATABASE ACCESSION NUMBER: GenBank No. NP002438
  ref <309>: DATABASE ENTRY DATE: 2004-10-28
MELLPPLPQSFLLLLLLPAKPAAGEDWQCPRTPYAASRDFDVKYVVPSFSAGGLVQAMVTYEGDRNESAVFVAIRNRLHVLGPDLKSVQSLATGPAGDPGCQTCAACGPGPHGPPGDTDTKVLVLDPALPALVSCGSSLQGRCFLHDLEPQGTAVHLAAPACLFSAHHNRPDDCPDCVASPLGTRVTVVEQGQASYFYVASSLDAAVAGSFSPRSVSIRRLKADASGFAPGFVALSVLPKHLVSYSIEYVHSFHTGAFVYFLTVQPASVTDDPSALHTRLARLSATEPELGDYRELVLDCRFAPKRRRRGAPEGGQPYPVLQVAHSAPVGAQLATELSIAEGQEVLFGVFVTGKDGGPGVGPNSVVCAFPIDLLDTLIDEGVERCCESPVHPGLRRGLDFFQSPSFCPNPPGLEALSPNTSCRHFPLLVSSSFSRVDLFNGLLGPVQVTALYVTRLDNVTVAHMGTMDGRILQVELVRSLNYLLYVSNFSLGDSGQPVQRDVSRLGDHLLFASGDQVFQVPIRGPGCRHFLTCGRCLRAWHFMGCGWCGNMCGQQKECPGSWQQDHCPPKLTEFHPHSGPLRGSTRLTLCGSNFYLHPSGLVPEGTHQVTVGQSPCRPLPKDSSKLRPVPRKDFVEEFECELEPLGTQAVGPTNVSLTVTNMPPGKHFRVDGTSVLRGFSFMEPVLIAVQPLFGPRAGGTCLTLEGQSLSVGTSRAVLVNGTECLLARVSEGQLLCATPPGATVASVPLSLQVGGAQVPGSWTFQYREDPVVLSISPNCGYINSHITICGQHLTSAWHLVLSFHDGLRAVESRCERQLPEQQLCRLPEYVVRDPQGWVAGNLSARGDGAAGFTLPGFRFLPPPHPPSANLVPLKPEEHAIKFEYIGLGAVADCVGINVTVGGESCQHEFRGDMVVCPLPPSLQLGQDGAPLQVCVDGECHILGRVVRPGPDGVPQSTLLGILLPLLLLVAALATALVFSYWWRRKQLVLPPNLNDLASLDQTAGATPLPILYSGSDYRSGLALPAIDGLDSTTCVHGASFSDSEDESCVPLLRKESIQLRDLDSALLAEVKDVLIPHERVVTHSDRVIGKGHFGVVYHGEYIDQAQNRIQCAIKSLSRITEMQQVEAFLREGLLMRGLNHPNVLALIGIMLPPEGLPHVLLPYMCHGDLLQFIRSPQRNPTVKDLISFGLQVARGMEYLAEQKFVHRDLAARNCMLDESFTVKVADFGLARDILDREYYSVQQHRHARLPVKWMALESLQTYRFTTKSDVWSFGVLLWELLTRGAPPYRHIDPFDLTHFLAQGRRLPQPEYCPDSLYQVMQQCWEADPAVRPTFRVLVGEVEQIVSALLGDHYVQLPATYMNLGPSTSHEMNVRPEQPQFSPMPGNVRRPRPLSEPPRPT

SEQ ID NO: 215 - protein, 1124 aa, Homo sapiens
  ref <308>: DATABASE ACCESSION NUMBER: GenBank No. NP000450
  ref <309>: DATABASE ENTRY DATE: 2004-10-26
MDSLASLVLCGVSLLLSGTVEGAMDLILINSLPLVSDAETSLTCIASGWRPHEPITIGRDFEALMNQHQDPLEVTQDVTREWAKKVVWKREKASKINGAYFCEGRVRGEAIRIRTMKMRQQASFLPATLTMTVDKGDNVNISFKKVLIKEEDAVIYKNGSFIHSVPRHEVPDILEVHLPHAQPQDAGVYSARYIGGNLFTSAFTRLIVRRCEAQKWGPECNHLCTACMNNGVCHEDTGECICPPGFMGRTCEKACELHTFGRTCKERCSGQEGCKSYVFCLPDPYGCSCATGWKGLQCNEACHPGFYGPDCKLRCSCNNGEMCDRFQGCLCSPGWQGLQCEREGIPRMTPKIVDLPDHIEVNSGKFNPICKASGWPLPTNEEMTLVKPDGTVLHPKDFNHTDHFSVAIFTIHRILPPDSGVWVCSVNTVAGMVEKPFNISVKVLPKPLNAPNVIDTGHNFAVINISSEPYFGDGPIKSKKLLYKPVNHYEAWQHIQVTNEIVTLNYLEPRTEYELCVQLVRRGEGGEGHPGPVRRFTTASIGLPPPRGLNLLPKSQTTLNLTWQPIFPSSEDDFYVEVERRSVQKSDQQNIKVPGNLTSVLLNNLHPREQYVVRARVNTKAQGEWSEDLTAWTLSDILPPQPENIKISNITHSSAVISWTILDGYSISSITIRYKVQGKNEDQHVDVKIKNATIIQYQLKGLEPETAYQVDIFAENNIGSSNPAFSHELVTLPESQAPADLGGGKMLLIAILGSAGMTCLTVLLAFLIILQLKRANVQRRMAQAFQNVREEPAVQFNSGTLALNRKVKNNPDPTIYPVLDWNDIKFQDVIGEGNFGQVLKARIKKDGLRMDAAIKRMKEYASKDDHRDFAGELEVLCKLGHHPNIINLLGACEHRGYLYLAIEYAPHGNLLDFLRKSRVLETDPAFAIANSTASTLSSQQLLHFAADVARGMDYLSQKQFIHRDLAARNILVGENYVAKIADFGLSRGQEVYVKKTMGRLPVRWMAIESLNYSVYTTNSDVWSYGVLLWEIVSLGGTPYCGMTCAELYEKLPQGYRLEKPLNCDDEVYDLMRQCWREKPYERPSFAQILVSLNRMLEERKTYVNTTLYEKFTYAGIDCSAEEAA

SEQ ID NO: 216 - protein, 1138 aa, Homo sapiens
  ref <308>: DATABASE ACCESSION NUMBER: GenBank No. NP005415
  ref <309>: DATABASE ENTRY DATE: 2004-12-18
MVWRVPPFLLPILFLASHVGAAVDLTLLANLRLTDPQRFFLTCVSGEAGAGRGSDAWGPPLLLEKDDRIVRTPPGPPLRLARNGSHQVTLRGFSKPSDLVGVFSCVGGAGARRTRVIYVHNSPGAHLLPDKVTHTVNKGDTAVLSARVHKEKQTDVIWKSNGSYFYTLDWHEAQDGRFLLQLPNVQPPSSGIYSATYLEASPLGSAFFRLIVRGCGAGRWGPGCTKECPGCLHGGVCHDHDGECVCPPGFTGTRCEQACREGRFGQSCQEQCPGISGCRGLTFCLPDPYGCSCGSGWRGSQCQEACAPGHFGADCRLQCQCQNGGTCDRFSGCVCPSGWHGVHCEKSDRIPQILNMASELEFNLETMPRINCAAAGNPFPVRGSIELRKPDGTVLLSTKAIVEPEKTTAEFEVPRLVLADSGFWECRVSTSGGQDSRRFKVNVKVPPVPLAAPRLLTKQSRQLVVSPLVSFSGDGPISTVRLHYRPQDSTMDWSTIVVDPSENVTLMNLRPKTGYSVRVQLSRPGEGGEGAWGPPTLMTTDCPEPLLQPWLEGWHVEGTDRLRVSWSLPLVPGPLVGDGFLLRLWDGTRGQERRENVSSPQARTALLTGLTPGTHYQLDVQLYHCTLLGPASPPAHVLLPPSGPPAPRHLHAQALSDSEIQLTWKHPEALPGPISKYVVEVQVAGGAGDPLWIDVDRPEETSTIIRGLNASTRYLFRMRASIQGLGDWSNTVEESTLGNGLQAEGPVQESRAAEEGLDQQLILAVVGSVSATCLTILAALLTLVCIRRSCLHRRRTFTYQSGSGEETILQFSSGTLTLTRRPKLQPEPLSYPVLEWEDITFEDLIGEGNFGQVIRAMIKKDGLKMNAAIKMLKEYASENDHRDFAGELEVLCKLGHHPNIINLLGACKNRGYLYIAIEYAPYGNLLDFLRKSRVLETDPAFAREHGTASTLSSRQLLRFASDAANGMQYLSEKQFIHRDLAARNVLVGENLASKIADFGLSRGEEVYVKKTMGRLPVRWMAIESLNYSVYTTKSDVWSFGVLLWEIVSLGGTPYCGMTCAELYEKLPQGYRMEQPRNCDDEVYELMRQCWRDRPYERPPFAQIALQLGRMLEARKAYVNMSLFENFTYAGIDATAEEA

SEQ ID NO: 217 - protein, 455 aa, Homo sapiens
  ref <308>: DATABASE ACCESSION NUMBER: GenBank No. NP001056
  ref <309>: DATABASE ENTRY DATE: 2004-10-27
MGLSTVPDLLLPLVLLELLVGIYPSGVIGLVPHLGDREKRDSVCPQGKYIHPQNNSICCTKCHKGTYLYNDCPGPGQDTDCRECESGSFTASENHLRHCLSCSKCRKEMGQVEISSCTVDRDTVCGCRKNQYRHYWSENLFQCFNCSLCLNGTVHLSCQEKQNTVCTCHAGFFLRENECVSCSNCKKSLECTKLCLPQIENVKGTEDSGTTVLLPLVIFFGLCLLSLLFIGLMYRYQRWKSKLYSIVCGKSTPEKEGELEGTTTKPLAPNPSFSPTPGFTPTLGFSPVPSSTFTSSSTYTPGDCPNFAAPRREVAPPYQGADPILATALASDPIPNPLQKWEDSAHKPQSLDTDDPATLYAVVENVPPLRWKEFVRRLGLSDHEIDRLELQNGRCLREAQYSMLATWRRRTPRREATLELLGRVLRDMDLLGCLEDIEEALCGPAALPPAPSLLR

SEQ ID NO: 218 - protein, 461 aa, Homo sapiens
  ref <308>: DATABASE ACCESSION NUMBER: GenBank No. NP001057
  ref <309>: DATABASE ENTRY DATE: 2004-10-26
MAPVAVWAALAVGLELWAAAHALPAQVAFTPYAPEPGSTCRLREYYDQTAQMCCSKCSPGQHAKVFCTKTSDTVCDSCEDSTYTQLWNWVPECLSCGSRCSSDQVETQACTREQNRICTCRPGWYCALSKQEGCRLCAPLRKCRPGFGVARPGTETSDVVCKPCAPGTFSNTTSSTDICRPHQICNVVAIPGNASMDAVCTSTSPTRSMAPGAVHLPQPVSTRSQHTQPTPEPSTAPSTSFLLPMGPSPPAEGSTGDFALPVGLIVGVTALGLLIIGVVNCVIMTQVKKKPLCLQREAKVPHLPADKARGTQGPEQQHLLITAPSSSSSSLESSASALDRRAPTRNQPQAPGVEASGAGEARASTGSSDSSPGGHGTQVNVTCIVNVCSSSDHSSQCSSQASSTMGDTDSSPSESPKDEQVPFSKEECAFRSQLETPETLLGSTEEKPLPLGVPDAGMKPS

SEQ ID NO: 219 - protein, 1338 aa, Homo sapiens
  ref <308>: DATABASE ACCESSION NUMBER: GenBank No. NP002010
  ref <309>: DATABASE ENTRY DATE: 2004-10-28
MVSYWDTGVLLCALLSCLLLTGSSSGSKLKDPELSLKGTQHIMQAGQTLHLQCRGEAAHKWSLPEMVSKESERLSITKSACGRNGKQFCSTLTLNTAQANHTGFYSCKYLAVPTSKKKETESAIYIFISDTGRPFVEMYSEIPEIIHMTEGRELVIPCRVTSPNITVTLKKFPLDTLIPDGKRIIWDSRKGFIISNATYKEIGLLTCEATVNGHLYKTNYLTHRQTNTIIDVQISTPRPVKLLRGHTLVLNCTATTPLNTRVQMTWSYPDEKNKRASVRRRIDQSNSHANIFYSVLTIDKMQNKDKGLYTCRVRSGPSFKSVNTSVHIYDKAFITVKHRKQQVLETVAGKRSYRLSMKVKAFPSPEVVWLKDGLPATEKSARYLTRGYSLIIKDVTEEDAGNYTILLSIKQSNVFKNLTATLIVNVKPQIYEKAVSSFPDPALYPLGSRQILTCTAYGIPQPTIKWFWHPCNHNHSEARCDFCSNNEESFILDADSNMGNRIESITQRMAIIEGKNKMASTLVVADSRISGIYICIASNKVGTVGRNISFYITDVPNGFHVNLEKMPTEGEDLKLSCTVNKFLYRDVTWILLRTVNNRTMHYSISKQKMAITKEHSITLNLTIMNVSLQDSGTYACRARNVYTGEEILQKKEITIRDQEAPYLLRNLSDHTVAISSSTTLDCHANGVPEPQITWFKNNHKIQQEPGIILGPGSSTLFIERVTEEDEGVYHCKATNQKGSVESSAYLTVQGTSDKSNLELITLTCTCVAATLFWLLLTLLIRKMKRSSSEIKTDYLSIIMDPDEVPLDEQCERLPYDASKWEFARERLKLGKSLGRGAFGKVVQASAFGIKKSPTCRTVAVKMLKEGATASEYKALMTELKILTHIGHHLNVVNLLGACTKQGGPLMVIVEYCKYGNLSNYLKSKRDLFFLNKDAALHMEPKKEKMEPGLEQGKKPRLDSVTSSESFASSGFQEDKSLSDVEEEEDSDGFYKEPITMEDLISYSFQVARGMEFLSSRKCIHRDLAARNILLSENNVVKICDFGLARDIYKNPDYVRKGDTRLPLKWMAPESIFDKIYSTKSDVWSYGVLLWEIFSLGGSPYPGVQMDEDFCSRLREGMRMRAPEYSTPEIYQIMLDCWHRDPKERPRFAELVEKLGDLLQANVQQDGKDYIPINAILTGNSGFTYSTPAFSEDFFKESISAPKFNSGSSDDVRYVNAFKFMSLERIKTFEELLPNATSMFDDYQGDSSTLLASPMLKRFTWTDSKPKASLKIDLRVTSKSKESGLSDVSRPSFCHSSCGHVSEGKRRFTYDHAELERKIACCSPPPDYNSVVLYSTPPI

SEQ ID NO: 220 - protein, 1356 aa, Homo sapiens
  ref <308>: DATABASE ACCESSION NUMBER: GenBank No. NP002244
  ref <309>: DATABASE ENTRY DATE: 2004-10-26
MQSKVLLAVALWLCVETRAASVGLPSVSLDLPRLSIQKDILTIKANTTLQITCRGQRDLDWLWPNNQSGSEQRVEVTECSDGLFCKTLTIPKVIGNDTGAYKCFYRETDLASVIYVYVQDYRSPFIASVSDQHGVVYITENKNKTVVIPCLGSISNLNVSLCARYPEKRFVPDGNRISWDSKKGFTIPSYMISYAGMVFCEAKINDESYQSIMYIVVVVGYRIYDVVLSPSHGIELSVGEKLVLNCTARTELNVGIDFNWEYPSSKHQHKKLVNRDLKTQSGSEMKKFLSTLTIDGVTRSDQGLYTCAASSGLMTKKNSTFVRVHEKPFVAFGSGMESLVEATVGERVRIPAKYLGYPPPEIKWYKNGIPLESNHTIKAGHVLTIMEVSERDTGNYTVILTNPISKEKQSHVVSLVVYVPPQIGEKSLISPVDSYQYGTTQTLTCTVYAIPPPHHIHWYWQLEEECANEPSQAVSVTNPYPCEEWRSVEDFQGGNKIEVNKNQFALIEGKNKTVSTLVIQAANVSALYKCEAVNKVGRGERVISFHVTRGPEITLQPDMQPTEQESVSLWCTADRSTFENLTWYKLGPQPLPIHVGELPTPVCKNLDTLWKLNATMFSNSTNDILIMELKNASLQDQGDYVCLAQDRKTKKRHCVVRQLTVLERVAPTITGNLENQTTSIGESIEVSCTASGNPPPQIMWFKDNETLVEDSGIVLKDGNRNLTIRRVRKEDEGLYTCQACSVLGCAKVEAFFIIEGAQEKTNLEIIILVGTAVIAMFFWLLLVIILRTVKRANGGELKTGYLSIVMDPDELPLDEHCERLPYDASKWEFPRDRLKLGKPLGRGAFGQVIEADAFGIDKTATCRTVAVKMLKEGATHSEHRALMSELKILIHIGHHLNVVNLLGACTKPGGPLMVIVEFCKFGNLSTYLRSKRNEFVPYKTKGARFRQGKDYVGAIPVDLKRRLDSITSSQSSASSGFVEEKSLSDVEEEEAPEDLYKDFLTLEHLICYSFQVAKGMEFLASRKCIHRDLAARNILLSEKNVVKICDFGLARDIYKDPDYVRKGDARLPLKWMAPETIFDRVYTIQSDVWSFGVLLWEIFSLGASPYPGVKIDEEFCRRLKEGTRMRAPDYTTPEMYQTMLDCWHGEPSQRPTFSELVEHLGNLLQANAQQDGKDYIVLPISETLSMEEDSGLSLPTSPVSCMEEEEVCDPKFHYDNTAGISQYLQNSKRKSRPVSVKTFEDIPLEEPEVKVIPDDNQTDSGMVLASEELKTLEDRTKLSPSFGGMVPSKSRESVASEGSNQTSGYQSGYHSDDTDTTVYSSEEAELLKLIEIGVQTGSTAQILQPDSGTTLSSPPV

SEQ ID NO: 221 - protein, 1298 aa, Homo sapiens
  ref <308>: DATABASE ACCESSION NUMBER: GenBank No. NP002011
  ref <309>: DATABASE ENTRY DATE: 2004-12-18
MQRGAALCLRLWLCLGLLDGLVSDYSMTPPTLNITEESHVIDTGDSLSISCRGQHPLEWAWPGAQEAPATGDKDSEDTGVVRDCEGTDARPYCKVLLLHEVHANDTGSYVCYYKYIKARIEGTTAASSYVFVRDFEQPFINKPDTLLVNRKDAMWVPCLVSIPGLNVTLRSQSSVLWPDGQEVVWDDRRGMLVSTPLLHDALYLQCETTWGDQDFLSNPFLVHITGNELYDIQLLPRKSLELLVGEKLVLNCTVWAEFNSGVTFDWDYPGKQAERGKWVPERRSQQTHTELSSILTIHNVSQHDLGSYVCKANNGIQRFRESTEVIVHENPFISVEWLKGPILEATAGDELVKLPVKLAAYPPPEFQWYKDGKALSGRHSPHALVLKEVTEASTGTYTLALWNSAAGLRRNISLELVVNVPPQIHEKEASSPSIYSRHSRQALTCTAYGVPLPLSIQWHWRPWTPCKMFAQRSLRRRQQQDLMPQCRDWRAVTTQDAVNPIESLDTWTEFVEGKNKTVSKLVIQNANVSAMYKCVVSNKVGQDERLIYFYVTTIPDGFTIESKPSEELLEGQPVLLSCQADSYKYEHLRWYRLNLSTLHDAHGNPLLLDCKNVHLFATPLAASLEEVAPGARHATLSLSIPRVAPEHEGHYVCEVQDRRSHDKHCHKKYLSVQALEAPRLTQNLTDLLVNVSDSLEMQCLVAGAHAPSIVWYKDERLLEEKSGVDLADSNQKLSIQRVREEDAGPYLCSVCRPKGCVNSSASVAVEGSEDKGSMEIVILVGTGVIAVFFWVLLLLIFCNMRRPAHADIKTGYLSIIMDPGEVPLEEQCEYLSYDASQWEFPRERLHLGRVLGYGAFGKVVEASAFGIHKGSSCDTVAVKMLKEGATASEQRALMSELKILIHIGNHLNVVNLLGACTKPQGPLMVIVEFCKYGNLSNFLRAKRDAFSPCAEKSPEQRGRFRAMVELARLDRRRPGSSDRVLFARFSKTEGGARRASPDQEAEDLWLSPLTMEDLVCYSFQVARGMEFLASRKCIHRDLAARNILLSESDVVKICDFGLARDIYKDPDYVRKGSARLPLKWMAPESIFDKVYTTQSDVWSFGVLLWEIFSLGASPYPGVQINEEFCQRVRDGTRMRAPELATPAIRHIMLNCWSGDPKARPAFSDLVEILGDLLQGRGLQEEEEVCMAPRSSQSSEEGSFSQVSTMALHIAQADAEDSPPSLQRHSLAARYYNWVSFPGCLARGAETRGSSRMKTFEEFPMTPTTYKGSVDNQTDSGMVLASEEFEQIESRHRQESGFR

SEQ ID NO: 222 - protein, 972 aa, Homo sapiens
  VARIANT 279: Xaa = V or M
  VARIANT 362: Xaa = H or R
  VARIANT 969: Xaa = Y or C
MGPGVLLLLLVATAWHGQGIPVIEPSVPELVVKPGATVTLRCVGNGSVEWDGPPSPHWTLYSDGSSSILSTNNATFQNTGTYRCTEPGDPLGGSAAIHLYVKDPARPWNVLAQEVVVFEDQDALLPCLLTDPVLEAGVSLVRVRGRPLMRHTNYSFSPWHGFTIHRAKFIQSQDYQCSALMGGRKVMSISIRLKVQKVIPGPPALTLVPAELVRIRGEAAQIVCSASSVDVNFDVFLQHNNTKLAIPQQSDFHNNRYQKVLTLNLDQVDFQHAGNYSCXASNVQGKHSTSMFFRVVESAYLNLSSEQNLIQEVTVGEGLNLKVMVEAYPGLQGFNWTYLGPFSDHQPEPKLANATTKDTYRXTFTLSLPRLKPSEAGRYSFLARNPGGWRALTFELTLRYPPEVSVIWTFINGSGTLLCAASGYPQPNVTWLQCSGHTDRCDEAQVLQVWDDPYPEVLSQEPFHKVTVQSLLTVETLEHNQTYECRAHNSVGSGSWAFIPISAGAHTHPPDEFLFTPVVVACMSIMALLLLLLLLLLYKYKQKPKYQVRWKIIESYEGNSYTFIDPTQLPYNEKWEFPRNNLQFGKTLGAGAFGKVVEATAFGLGKEDAVLKVAVKMLKSTAHADEKEALMSELKIMSHLGQHENIVNLLGACTHGGPVLVITEYCCYGDLLNFLRRKAEAMLGPSLSPGQDPEGGVDYKNIHLEKKYVRRDSGFSSQGVDTYVEMRPVSTSSNDSFSEQDLDKEDGRPLELRDLLHFSSQVAQGMAFLASKNCIHRDVAARNVLLTNGHVAKIGDFGLARDIMNDSNYIVKGNARLPVKWMAPESIFDCVYTVQSDVWSYGILLWEIFSLGLNPYPGILVNSKFYKLVKDGYQMAQPAFAPKNIYSIMQACWALEPTHRPTFQQICSFLQEQAQEDRRERDYTNLPSSSRSGGSGSSSSELEEESSSEHLTCCEQGDIAQPLLQPNNXQFC

SEQ ID NO: 223 - protein, 913 aa, Homo sapiens
  VARIANT 53: Xaa = W or A
  VARIANT 55,  68: Xaa = D or A
  VARIANT 66, 175: Xaa = S or A
  VARIANT 105: Xaa = R or A
  VARIANT 106: Xaa = H or A
  VARIANT 110: Xaa = L or A
  VARIANT 112: Xaa = K or A
  VARIANT 173: Xaa = V or A
  VARIANT 174: Xaa = M or A
MGPEALSSLLLLLLVASGDADMKGHFDPAKCRYALGMQDRTIPDSDISASSSXSXSTAARHSRLEXSXGDGAWCPAGSVFPKEEEYLQVDLQRLHLVALVGTQGXXAGGXGXEFSRSYRLRYSRDGRRWMGWKDRWGQEVISGNEDPEGVVLKDLGPPMVARLVRFYPRADRXXXVCLRVELYGCLWRDGLLSYTAPVGQTMYLSEAVYLNDSTYDGHTVGGLQYGGLGQLADGVVGLDDFRKSQELRVWPGYDYVGWSNHSFSSGYVEMEFEFDRLRAFQAMQVHCNNMHTLGARLPGGVECRFRRGPAMAWEGEPMRHNLGGNLGDPRARAVSVPLGGRVARFLQCRFLFAGPWLLFSEISFISDVVNNSSPALGGTFPPAPWWPPGPPPTNFSSLELEPRGQQPVAKAEGSPTAILIGCLVAIILLLLLIIALMLWRLHWRRLLSKAERRVLEEELTVHLSVPGDTILINNRPGPREPPPYQEPRPRGNPPHSAPCVPNGSALLLSNPAYRLLLATYARPPRGPGPPTPAWAKPTNTQAYSGDYMEPEKPGAPLLPPPPQNSVPHYAEADIVTLQGVTGGNTYAVPALPPGAVGDGPPRVDFPRSRLRFKEKLGEGQFGEVHLCEVDSPQDLVSLDFPLNVRKGHPLLVAVKILRPDATKNARNDFLKEVKIMSRLKDPNIIRLLGVCVQDDPLCMITDYMENGDLNQFLSAHQLEDKAAEGAPGDGQAAQGPTISYPMLLHVAAQIASGMRYLATLNFVHRDLATRNCLVGENFTIKIADFGMSRNLYAGDYYRVQGRAVLPIRWMAWECILMGKFTTASDVWAFGVTLWEVLMLCRAQPFGSAHRRAGHRERGGVLPGPGPAVYLSRPPACPQGLYELMLRCWSRESEQRPPFSQLHRFLAEDALNTV

SEQ ID NO: 224 - protein, 855 aa, Homo sapiens
  VARIANT 550: Xaa = G or R
MILIPRMLLVLFLLLPILSSAKAQVNPAICRYPLGMSGGQIPDEDITASSQWSESTAAKYGRLDSEEGDGAWCPEIPVEPDDLKEFLQIDLHTLHFITLVGTQGRHAGGHGIEFAPMYKINYSRDGTRWISWRNRHGKQVLDGNSNPYDIFLKDLEPPIVARFVRFIPVTDHSMNVCMRVELYGCVWLDGLVSYNAPAGQQFVLPGGSIIYLNDSVYDGAVGYSMTEGLGQLTDGVSGLDDFTQTHEYHVWPGYDYVGWRNESATNGYIEIMFEFDRIRNFTTMKVHCNNMFAKGVKIFKEVQCYFRSEASEWEPNAISFPLVLDDVNPSARFVTVPLHHRMASAIKCQYHFADTWMMFSEITFQSDAAMYNNSEALPTSPMAPTTYDPMLKVDDSNTRILIGCLVAIIFILLAIIVIILWRQFWQKMLEKASRRMLDDEMTVSLSLPSDSSMFNNNRSSSPSEQGSNSTYDRIFPLRPDYQEPSRLIRKLPEFAPGEEESGCSGVVKPVQPSGPEGVPHYAEADIVNLQGVTGGNTYSVPAVTMDLLSXKDVAVEEFPRKLLTFKEKLGEGQFGEVHLCEVEGMEKFKDKDFALDVSANQPVLVAVKMLRADANKNARNDFLKEIKIMSRLKDPNIIHLLSVCITDDPLCMITEYMENGDLNQFLSRHEPPNSSSSDVRTVSYTNLKFMATQIASGMKYLSSLNFVHRDLATRNCLVGKNYTIKIADFGMSRNLYSGDYYRIQGRAVLPIRWMSWESILLGKFTTASDVWAFGVTLWETFTFCQEQPYSQLSDEQVIENTGEFFRDQGRQTYLPQPAICPDSVYKLMLSCWRRDTKNRPSFQEIHLLLLQQGDE

SEQ ID NO: 225 - protein, 1210 aa, Homo sapiens
  VARIANT 521: Xaa = R or K
MRPSGTAGAALLALLAALCPASRALEEKKVCQGTSNKLTQLGTFEDHFLSLQRMFNNCEVVLGNLEITYVQRNYDLSFLKTIQEVAGYVLIALNTVERIPLENLQIIRGNMYYENSYALAVLSNYDANKTGLKELPMRNLQEILHGAVRFSNNPALCNVESIQWRDIVSSDFLSNMSMDFQNHLGSCQKCDPSCPNGSCWGAGEENCQKLTKIICAQQCSGRCRGKSPSDCCHNQCAAGCTGPRESDCLVCRKFRDEATCKDTCPPLMLYNPTTYQMDVNPEGKYSFGATCVKKCPRNYVVTDHGSCVRACGADSYEMEEDGVRKCKKCEGPCRKVCNGIGIGEFKDSLSINATNIKHFKNCTSISGDLHILPVAFRGDSFTHTPPLDPQELDILKTVKEITGFLLIQAWPENRTDLHAFENLEIIRGRTKQHGQFSLAVVSLNITSLGLRSLKEISDGDVIISGNKNLCYANTINWKKLFGTSGQKTKIISNRGENSCKATGQVCHALCSPEGCWGPEPXDCVSCRNVSRGRECVDKCNLLEGEPREFVENSECIQCHPECLPQAMNITCTGRGPDNCIQCAHYIDGPHCVKTCPAGVMGENNTLVWKYADAGHVCHLCHPNCTYGCTGPGLEGCPTNGPKIPSIATGMVGALLLLLVVALGIGLFMRRRHIVRKRTLRRLLQERELVEPLTPSGEAPNQALLRILKETEFKKIKVLGSGAFGTVYKGLWIPEGEKVKIPVAIKELREATSPKANKEILDEAYVMASVDNPHVCRLLGICLTSTVQLITQLMPFGCLLDYVREHKDNIGSQYLLNWCVQIAKGMNYLEDRRLVHRDLAARNVLVKTPQHVKITDFGLAKLLGAEEKEYHAEGGKVPIKWMALESILHRIYTHQSDVWSYGVTVWELMTFGSKPYDGIPASEISSILEKGERLPQPPICTIDVYMIMVKCWMIDADSRPKFRELIIEFSKMARDPQRYLVIQGDERMHLPSPTDSNFYRALMDEEDMDDVVDADEYLIPQQGFFSSPSTSRTPLLSSLSATSNNSTVACIDRNGLQSCPIKEDSFLQRYSSDPTGALTEDSIDDTFLPVPEYINQSVPKRPAGSVQNPVYHNQPLNPAPSRDPHYQDPHSTAVGNPEYLNTVQPTCVNSTFDSPAHWAQKGSHQISLDNPDYQQDFFPKEAKPNGIFKGSTAENAEYLRVAPQSSEFIGA

SEQ ID NO: 226 - protein, 976 aa, Homo sapiens
  VARIANT 160: Xaa = A or V
MERRWPLGLGLVLLLCAPLPPGARAKEVTLMDTSKAQGELGWLLDPPKDGWSEQQQILNGTPLYMYQDCPMQGRRDTDHWLRSNWIYRGEEASRVHVELQFTVRDCKSFPGGAGPLGCKETFNLLYMESDQDVGIQLRRPLFQKVTTVAADQSFTIRDLXSGSVKLNVERCSLGRLTRRGLYLAFHNPGACVALVSVRVFYQRCPETLNGLAQFPDTLPGPAGLVEVAGTCLPHARASPRPSGAPRMHCSPDGEWLVPVGRCHCEPGYEEGGSGEACVACPSGSYRMDMDTPHCLTCPQQSTAESEGATICTCESGHYRAPGEGPQVACTGPPSAPRNLSFSASGTQLSLRWEPPADTGGRQDVRYSVRCSQCQGTAQDGGPCQPCGVGVHFSPGARGLTTPAVHVNGLEPYANYTFNVEAQNGVSGLGSSGHASTSVSISMGHAESLSGLSLRLVKKEPRQLELTWAGSRPRSPGANLTYELHVLNQDEERYQMVLEPRVLLTELQPDTTYIVRVRMLTPLGPGPFSPDHEFRTSPPVSRGLTGGEIVAVIFGLLLGAALLLGILVFRSRRAQRQRQQRQRDRATDVDREDKLWLKPYVDLQAYEDPAQGALDFTRELDPAWLMVDTVIGEGEFGEVYRGTLRLPSQDCKTVAIKTLKDTSPGGQWWNFLREATIMGQFSHPHILHLEGVVTKRKPIMIITEFMENGALDAFLREREDQLVPGQLVAMLQGIASGMNYLSNHNYVHRDLAARNILVNQNLCCKVSDFGLTRLLDDFDGTYETQGGKIPIRWTAPEAIAHRIFTTASDVWSFGIVMWEVLSFGDKPYGEMSNQEVMKSIEDGYRLPPPVDCPAPLYELMKNCWAYDRARRPHFQKLQAHLEQLLANPHSLRTIANFDPRMTLRLPSLSGSDGIPYRTVSEWLESIRMKRYILHFHSAGLDTMECVLELTAEDLTQMGITLPGHQKRILCSIQGFKD

SEQ ID NO: 227 - protein, 976 aa, Homo sapiens
  VARIANT 94: Xaa = I or N
  VARIANT 96: Xaa = I or F
  VARIANT 99: Xaa = K or N
  VARIANT 350: Xaa = P or T
  VARIANT 825: Xaa = E or K
MELQAARACFALLWGCALAAAAAAQGKEVVLLDFAAAGGELGWLTHPYGKGWDLMQNIMNDMPIYMYSVCNVMSGDQDNWLRTNWVYRGEAERXFXELXFTVRDCNSFPGGASSCKETFNLYYAESDLDYGTNFQKRLFTKIDTIAPDEITVSSDFEARHVKLNVEERSVGPLTRKGFYLAFQDIGACVALLSVRVYYKKCPELLQGLAHFPETIAGSDAPSLATVAGTCVDHAVVPPGGEEPRMHCAVDGEWLVPIGQCLCQAGYEKVEDACQACSPGFFKFEASESPCLECPEHTLPSPEGATSCECEEGFFRAPQDPASMPCTRPPSAPHYLTAVGMGAKVELRWTXPQDSGGREDIVYSVTCEQCWPESGECGPCEASVRYSEPPHGLTRTSVTVSDLEPHMNYTFTVEARNGVSGLVTSRSFRTASVSINQTEPPKVRLEGRSTTSLSVSWSIPPPQQSRVWKYEVTYRKKGDSNSYNVRRTEGFSVTLDDLAPDTTYLVQVQALTQEGQGAGSKVHEFQTLSPEGSGNLAVIGGVAVGVVLLLVLAGVGFFIHRRRKNQRARQSPEDVYFSKSEQLKPLKTYVDPHTYEDPNQAVLKFTTEIHPSCVTRQKVIGAGEFGEVYKGMLKTSSGKKEVPVAIKTLKAGYTEKQRVDFLGEAGIMGQFSHHNIIRLEGVISKYKPMMIITEYMENGALDKFLREKDGEFSVLQLVGMLRGIAAGMKYLANMNYVHRDLAARNILVNSNLVCKVSDFGLSRVLEDDPEATYTTSGGKIPIRWTAPEAISYRKFTSASDVWSFGIVMWEVMTYGERPYWELSNHXVMKAINDGFRLPTPMDCPSAIYQLMMQCWQQERARRPKFADIVSILDKLIRAPDSLKTLADFDPRVSIRLPSTSGSEGVPFRTVSEWLESIKMQQYTEHFMAAGYTAIEKVVQMTNDDIKRIGVRLPGHQKRIAYSLLGLKDQVNTVGIPI

SEQ ID NO: 228 - protein, 983 aa, Homo sapiens
  VARIANT 914: Xaa = R or H
MDCQLSILLLLSCSVLDSFGELIPQPSNEVNLLDSKTIQGELGWISYPSHGWEEISGVDEHYTPIRTYQVCNVMDHSQNNWLRTNWVPRNSAQKIYVELKFTLRDCNSIPLVLGTCKETFNLYYMESDDDHGVKFREHQFTKIDTIAADESFTQMDLGDRILKLNTEIREVGPVNKKGFYLAFQDVGACVALVSVRVYFKKCPFTVKNLAMFPDTVPMDSQSLVEVRGSCVNNSKEEDPPRMYCSTEGEWLVPIGKCSCNAGYEERGFMCQACRPGFYKALDGNMKCAKCPPHSSTQEDGSMNCRCENNYFRADKDPPSMACTRPPSSPRNVISNINETSVILDWSWPLDTGGRKDVTFNIICKKCGWNIKQCEPCSPNVRFLPRQFGLTNTTVTVTDLLAHTNYTFEIDAVNGVSELSSPPRQFAAVSITTNQAAPSPVLTIKKDRTSRNSISLSWQEPEHPNGIILDYEVKYYEKQEQETSYTILRARGTNVTISSLKPDTIYVFQIRARTAAGYGTNSRKFEFETSPDSFSISGESSQVVMIAISAAVAIILLTVVIYVLIGRFCGYKSKHGADEKRLHFGNGHLKLPGLRTYVDPHTYEDPTQAVHEFAKELDATNISIDKVVGAGEFGEVCSGRLKLPSKKEISVAIKTLKVGYTEKQRRDFLGEASIMGQFDHPNIIRLEGVVTKSKPVMIVTEYMENGSLDSFLRKHDAQFTVIQLVGMLRGIASGMKYLSDMGYVHRDLAARNILINSNLVCKVSDFGLSRVLEDDPEAAYTTRGGKIPIRWTSPEAIAYRKFTSASDVWSYGIVLWEVMSYGERPYWEMSNQDVIKAVDEGYRLPPPMDCPAALYQLMLDCWQKDRNNRPKFEQIVSILDKLIRNPGSLKIITSAAARPSNLLLDQSNVDITTFXTTGDWLNGVWTAHCKEIFTGVEYSSCDTIAKISTDDMKKVGVTVVGPQKKIISSIKALETQSKNGPVPV

SEQ ID NO: 229 - protein, 998 aa, Homo sapiens
  VARIANT 138: Xaa = I or V
  VARIANT 278: Xaa = P or S
MVFQTRYPSWIILCYIWLLRFAHTGEAQAAKEVLLLDSKAQQTELEWISSPPNGWEEISGLDENYTPIRTYQVCQVMEPNQNNWLRTNWISKGNAQRIFVELKFTLRDCNSLPGVLGTCKETFNLYYYETDYDTGRNXRENLYVKIDTIAADESFTQGDLGERKMKLNTEVREIGPLSKKGFYLAFQDVGACIALVSVKVYYKKCWSIIENLAIFPDTVTGSEFSSLVEVRGTCVSSAEEEAENAPRMHCSAEGEWLVPIGKCICKAGYQQKGDTCEXCGRGFYKSSSQDLQCSRCPTHSFSDKEGSSRCECEDGYYRAPSDPPYVACTRPPSAPQNLIFNINQTTVSLEWSPPADNGGRNDVTYRILCKRCSWEQGECVPCGSNIGYMPQQTGLEDNYVTVMDLLAHANYTFEVEAVNGVSDLSRSQRLFAAVSITTGQAAPSQVSGVMKERVLQRSVELSWQEPEHPNGVITEYEIKYYEKDQRERTYSTVKTKSTSASINNLKPGTVYVFQIRAFTAAGYGNYSPRLDVATLEEATGKMFEATAVSSEQNPVIIIAVVAVAGTIILVFMVFGFIIGRRHCGYSKADQEGDEELYFHFKFPGTKTYIDPETYEDPNRAVHQFAKELDASCIKIERVIGAGEFGEVCSGRLKLPGKRDVAVAIKTLKVGYTEKQRRDFLCEASIMGQFDHPNVVHLEGVVTRGKPVMIVIEFMENGALDAFLRKHDGQFTVIQLVGMLRGIAAGMRYLADMGYVHRDLAARNILVNSNLVCKVSDFGLSRVIEDDPEAVYTTTGGKIPVRWTAPEAIQYRKFTSASDVWSYGIVMWEVMSYGERPYWDMSNQDVIKAIEEGYRLPAPMDCPAGLHQLMLDCWQKERAERPKFEQIVGILDKMIRNPNSLKTPLGTCSRPISPLLDQNTPDFTTFCSVGEWLQAIKMERYKDNFTAAGYNSLESVARMTIEDVMSLGITLVGHQKKIMSSIQTMRAQMLHLHGTGIQV

SEQ ID NO: 230 - protein, 1005 aa, Homo sapiens
  VARIANT 301: Xaa = A or V
  VARIANT 444: Xaa = V or M
  VARIANT 612: Xaa = E or Q
MAPARGRLPPALWVVTAAAAAATCVSAARGEVNLLDTSTIHGDWGWLTYPAHGWDSINEVDESFQPIHTYQVCNVMSPNQNNWLRTSWVPRDGARRVYAEIKFTLRDCNSMPGVLGTCKETFNLYYLESDRDLGASTQESQFLKIDTIAADESFTGADLGVRRLKLNTEVRSVGPLSKRGFYLAFQDIGACLAILSLRIYYKKCPAMVRNLAAFSEAVTGADSSSLVEVRGQCVRHSEERDTPKMYCSAEGEWLVPIGKCVCSAGYEERRDACVACELGFYKSAPGDQLCARCPPHSHSAXPAAQACHCDLSYYRAALDPPSSACTRPPSAPVNLISSVNGTSVTLEWAPPLDPGGRSDITYNAVCRRCPWALSRCEACGSGTRFVPQQTSLVQASLLVANLLAHMNYSFWIEAVNGVSDLSPEPRRAAVVNITTNQAAPSQVXVIRQERAGQTSVSLLWQEPEQPNGIILEYEIKYYEKDKEMQSYSTLKAVTTRATVSGLKPGTRYVFQVRARTSAGCGRFSQAMEVETGKPRPRYDTRTIVWICLTLITGLVVLLLLLICKKRHCGYSKAFQDSDEEKMHYQNGQAPPPVFLPLHHPPGKLPEPQFYAXPHTYEEPGRAGRSFTREIEASRIHIEKIIGSGDSGEVCYGRLRVPGQRDVPVAIKALKAGYTERQRRDFLSEASIMGQFDHPNIIRLEGVVTRGRLAMIVTEYMENGSLDTFLRTHDGQFTIMQLVGMLRGVGAGMRYLSDLGYVHRDLAARNVLVDSNLVCKVSDFGLSRVLEDDPDAAYTTTGGKIPIRWTAPEAIAFRTFSSASDVWSFGVVMWEVLAYGERPYWNMTNRDVISSVEEGYRLPAPMGCPHALHQLMLDCWHKDRAQRPRFSQIVSVLDALIRSPESLRATATVSRCPPPAFVRSCFDLRGGSGGGGGLTVGDWLDSIRMGRYRDHFAAGGYSSLGMVLRMNAQDVRALGITLMGHQKKILGSIQTMRAQLTSTQGPRRHL

SEQ ID NO: 231 - protein, 984 aa, Homo sapiens
  VARIANT 87: Xaa = T or S
  VARIANT 152, 367: Xaa = G or R
  VARIANT 274: Xaa = T or R
  VARIANT 485: Xaa = R or S
  VARIANT 813: Xaa = V or I
  VARIANT 847: Xaa = M or T
  VARIANT 973: Xaa = R or W
MALDYLLLLLLASAVAAMEETLMDTRTATAELGWTANPASGWEEVSGYDENLNTIRTYQVCNVFEPNQNNWLLTTFINRRGAHRIYXEMRFTVRDCSSLPNVPGSCKETFNLYYYETDSVIATKKSAFWSEAPYLKVDTIAADESFSQVDFXGRLMKVNTEVRSFGPLTRNGFYLAFQDYGACMSLLSVRVFFKKCPSIVQNFAVFPETMTGAESTSLVIARGTCIPNAEEVDVPIKLYCNGDGEWMVPIGRCTCKPGYEPENSVACKACPAGXFKASQEAEGCSHCPSNSRSPAEASPICTCRTGYYRADFDPPEVACTSVPSGPRNVISIVNETSIILEWHPPRETGGRDDVTYNIICKKCRADXRSCSRCDDNVEFVPRQLGLTECRVSISSLWAHTPYTFDIQAINGVSSKSPFPPQHVSVNITTNQAAPSTVPIMHQVSATMRSITLSWPQPEQPNGIILDYEIRYYEKEHNEFNSSMAXSQTNTARIDGLRPGMVYVVQVRARTVAGYGKFSGKMCFQTLTDDDYKSELREQLPLIAGSAAAGVVFVVSLVAISIVCSRKRAYSKEAVYSDKLQHYSTGRGSPGMKIYIDPFTYEDPNEAVREFAKEIDVSFVKIEEVIGAGEFGEVYKGRLKLPGKREIYVAIKTLKAGYSEKQRRDFLSEASIMGQFDHPNIIRLEGVVTKSRPVMIITEFMENGALDSFLRQNDGQFTVIQLVGMLRGIAAGMKYLAEMNYVHRDLAARNILVNSNLVCKVSDFGLSRYLQDDTSDPTYTSSLGGKIPVRWTAPEAIAYRKFTSASDVWSYGIXMWEVMSFGERPYWDMSNQDVINAIEQDYRLPPPXDCPAALHQLMLDCWQKDRNSRPRFAEIVNTLDKMIRNPASLKTVATITAVPSQPLLDRSIPDFTAFTTVDDWLSAIKMVQYRDSFLTAGFTSLQLVTQMTSEDLLRIGITLAGHQKKILNSIHSMXVQISQSPTAMA

SEQ ID NO: 232 - protein, 1055 aa, Homo sapiens
  VARIANT 923: Xaa = E or K
MALRRLGAALLLLPLLAAVEETLMDSTTATAELGWMVHPPSGWEEVSGYDENMNTIRTYQVCNVFESSQNNWLRTKFIRRRGAHRIHVEMKFSVRDCSSIPSVPGSCKETFNLYYYEADFDSATKTFPNWMENPWVKVDTIAADESFSQVDLGGRVMKINTEVRSFGPVSRSGFYLAFQDYGGCMSLIAVRVFYRKCPRIIQNGAIFQETLSGAESTSLVAARGSCIANAEEVDVPIKLYCNGDGEWLVPIGRCMCKAGFEAVENGTVCRGCPSGTFKANQGDEACTHCPINSRTTSEGATNCVCRNGYYRADLDPLDMPCTTIPSAPQAVISSVNETSLMLEWTPPRDSGGREDLVYNIICKSCGSGRGACTRCGDNVQYAPRQLGLTEPRIYISDLLAHTQYTFEIQAVNGVTDQSPFSPQFASVNITTNQAAPSAVSIMHQVSRTVDSITLSWSQPDQPNGVILDYELQYYEKELSEYNATAIKSPTNTVTVQGLKAGAIYVFQVRARTVAGYGRYSGKMYFQTMTEAEYQTSIQEKLPLIIGSSAAGLVFLIAVVVIAIVCNRRGFERADSEYTDKLQHYTSGHMTPGMKIYIDPFTYEDPNEAVREFAKEIDISCVKIEQVIGAGEFGEVCSGHLKLPGKREIFVAIKTLKSGYTEKQRRDFLSEASIMGQFDHPNVIHLEGVVTKSTPVMIITEFMENGSLDSFLRQNDGQFTVIQLVGMLRGIAAGMKYLADMNYVHRDLAARNILVNSNLVCKVSDFGLSRFLEDDTSDPTYTSALGGKIPIRWTAPEAIQYRKFTSASDVWSYGIVMWEVMSYGERPYWDMTNQDVINAIEQDYRLPPPMDCPSALHQLMLDCWQKDRNHRPKFGQIVNTLDKMIRNPNSLKAMAPLSSGINLPLLDRTIPDYTSFNTVDEWLXAIKMGQYKESFANAGFTSFDVVSQMMMEDILRVGVTLAGHQKKILNSIQVMRAQMNQIQSVEGQPLARRPRATGRTKRCQPRDVTKKTCNSNDGKKKGMGKKKTDPGRGREIQGIFFKEDSHKESNDCSCGG

SEQ ID NO: 233 - protein, 998 aa, Homo sapiens
  VARIANT 981: Xaa = S or I
MARARPPPPPSPPPGLLPLLPPLLLLPLLLLPAGCRALEETLMDTKWVTSELAWTSHPESGWEEVSGYDEAMNPIRTYQVCNVRESSQNNWLRTGFIWRRDVQRVYVELKFTVRDCNSIPNIPGSCKETFNLFYYEADSDVASASSPFWMENPYVKVDTIAPDESFSRLDAGRVNTKVRSFGPLSKAGFYLAFQDQGACMSLISVRAFYKKCASTTAGFALFPETLTGAEPTSLVIAPGTCIPNAVEVSVPLKLYCNGDGEWMVPVGACTCATGHEPAAKESQCRPCPPGSYKAKQGEGPCLPCPPNSRTTSPAASICTCHNNFYRADSDSADSACTTVPSPPRGVISNVNETSLILEWSEPRDLGGRDDLLYNVICKKCHGAGGASACSRCDDNVEFVPRQLGLTERRVHISHLLAHTRYTFEVQAVNGVSGKSPLPPRYAAVNITTNQAAPSEVPTLRLHSSSGSSLTLSWAPPERPNGVILDYEMKYFEKSEGIASTVTSQMNSVQLDGLRPDARYVVQVRARTVAGYGQYSRPAEFETTSERGSGAQQLQEQLPLIVGSATAGLVFVVAVVVIAIVCLRKQRHGSDSEYTEKLQQYIAPGMKVYIDPFTYEDPNEAVREFAKEIDVSCVKIEEVIGAGEFGEVCRGRLKQPGRREVFVAIKTLKVGYTERQRRDFLSEASIMGQFDHPNIIRLEGVVTKSRPVMILTEFMENCALDSFLRLNDGQFTVIQLVGMLRGIAAGMKYLSEMNYVHRDLAARNILVNSNLVCKVSDFGLSRFLEDDPSDPTYTSSLGGKIPIRWTAPEAIAYRKFTSASDVWSYGIVMWEVMSYGERPYWDMSNQDVINAVEQDYRLPPPMDCPTALHQLMLDCWVRDRNLRPKFSQIVNTLDKLIRNAASLKVIASAQSGMSQPLLDRTVPDYTTFTTVGDWLDAIKMGRYKESFVSAGFASFDLVAQMTAEDLLRIGVTLAGHQKKILXSIQDMRLQMNQTLPVQV

SEQ ID NO: 234 - protein, 987 aa, Homo sapiens
  VARIANT 463: Xaa = A or D
  VARIANT 471: Xaa = Y or D
  VARIANT 926: Xaa = E or D
MELRVLLCWASLAAALEETLLNTKLETADLKWVTFPQVDGQWEELSGLDEEQHSVRTYEVCDVQRAPGQAHWLRTGWVPRRGAVHVYATLRFTMLECLSLPRAGRSCKETFTVFYYESDADTATALTPAWMENPYIKVDTVAAEHLTRKRPGAEATGKVNVKTLRLGPLSKAGFYLAFQDQGACMALLSLHLFYKKCAQLTVNLTRFPETVPRELVVPVAGSCVVDAVPAPGPSPSLYCREDGQWAEQPVTGCSCAPGFEAAEGNTKCRACAQGTFKPLSGEGSCQPCPANSHSNTIGSAVCQCRVGYFRARTDPRGAPCTTPPSAPRSVVSRLNGSSLHLEWSAPLESGGREDLTYALRCRECRPGGSCAPCGGDLTFDPGPRDLVEPWVVVRGLRPDFTYTFEVTALNGVSSLATGPVPFEPVNVTTDREVPPAVSDIRVTRSSPSSLSLAWAVPRAPSGXVLDYEVKXHEKGAEGPSSVRFLKTSENRAELRGLKRGASYLVQVRARSEAGYGPFGQEHHSQTQLDESEGWREQLALIAGTAVVGVVLVLVVIVVAVLCLRKQSNGREAEYSDKHGQYLIGHGTKVYIDPFTYEDPNEAVREFAKEIDVSYVKIEEVIGAGEFGEVCRGRLKAPGKKESCVAIKTLKGGYTERQRREFLSEASIMGQFEHPNIIRLEGVVTNSMPVMILTEFMENGALDSFLRLNDGQFTVIQLVGMLRGIASGMRYLAEMSYVHRDLAARNILVNSNLVCKVSDFGLSRFLEENSSDPTYTSSLGGKIPIRWTAPEAIAFRKFTSASDAWSYGIVMWEVMSFGERPYWDMSNQDVINAIEQDYRLPPPPDCPTSLHQLMLDCWQKDRNARPRFPQVVSALDKMIRNPASLKIVARENGGASHPLLDQRQPHYSAFGSVGEWLRAIKMGRYEXSFAAAGFGSFELVSQISAEDLLRIGVTLAGHQKKILASVQHMKSQAKPGTPGGTGGPAPQY

SEQ ID NO: 235 - protein, 1006 aa, Homo sapiens
  VARIANT 107: Xaa = G or S
  VARIANT 267: Xaa = P or R
  VARIANT 309: Xaa = S or A
  VARIANT 484: Xaa = R or Q
MVCSLWVLLLVSSVLALEEVLLDTTGETSEIGWLTYPPGGWDEVSVLDDQRRLTRTFEACHVAGAPPGTGQDNWLQTHFVERRGAQRAHIRLHFSVRACSSLGVSGXTCRETFTLYYRQAEEPDSPDSVSSWHLKRWTKVDTIAADESFPSSSSSSSSSSSAAWAVGPHGAGQRAGLQLNVKERSFGPLTQRGFYVAFQDTGACLALVAVRLFSYTCPAVLRSFASFPETQASGAGGASLVAAVGTCVAHAEPEEDGVGGQAGGSPXRLHCNGEGKWMVAVGGCRCQPGYQPARGDKACQACPRGLYKXSAGNAPCSPCPARSHAPNPAAPVCPCLEGFYRASSDPPEAPCTGPPSAPQELWFEVQGSALMLHWRLPRELGGRGDLLFNVVCKECEGRQEPASGGGGTCHRCRDEVHFDPRQRGLTESRVLVGGLRAHVPYILEVQAVNGVSELSPDPPQAAAINVSTSHEVPSAVPVVHQVSXASNSITVSWPQPDQTNGNILDYQLRYYDQAEDESHSFTLTSETNTATVTQLSPGHIYGFQVRARTAAGHGPYGGKVYFQTLPQGELSSQLPERLSLVIGSILGALAFLLLAAITVLAVVFQRKRRGTGYTEQLQQYSSPGLGVKYYIDPSTYEDPCQAIRELAREVDPAYIKIEEVIGTGSFGEVRQGRLQPRGRREQTVAIQALWAGGAESLQMTFLGRAAVLGQFQHPNILRLEGVVTKSRPLMVLTEFMELGPLDSFLRQREGQFSSLQLVAMQRGVAAAMQYLSSFAFVHRSLSAHSVLVNSHLVCKVARLGHSPQGPSCLLRWAAPEVIAHGKHTTSSDVWSFGILMWEVMSYGERPYWDMSEQEVLNAIEQEFRLPPPPGCPPGLHLLMLDTWQKDRARRPHFDQLVAAFDKMIRKPDTLQAGGDPGERPSQALLTPVALDFPCLDSPQAWLSAIGLECYQDNFSKFGLCTFSDVAQLSLEDLPALGITLAGHQKKLLHHIQLLQQHLRQQGSVEV

SEQ ID NO: 236 - protein, 1255 aa, Homo sapiens
  VARIANT 655: Xaa = I or V
MELAALCRWGLLLALLPPGAASTQVCTGTDMKLRLPASPETHLDMLRHLYQGCQVVQGNLELTYLPTNASLSFLQDIQEVQGYVLIAHNQVRQVPLQRLRIVRGTQLFEDNYALAVLDNGDPLNNTTPVTGASPGGLRELQLRSLTEILKGGVLIQRNPQLCYQDTILWKDIFHKNNQLALTLIDTNRSRACHPCSPMCKGSRCWGESSEDCQSLTRTVCAGGCARCKGPLPTDCCHEQCAAGCTGPKHSDCLACLHFNHSGICELHCPALVTYNTDTFESMPNPEGRYTFGASCVTACPYNYLSTDVGSCTLVCPLHNQEVTAEDGTQRCEKCSKPCARVCYGLGMEHLREVRAVTSANIQEFAGCKKIFGSLAFLPESFDGDPASNTAPLQPEQLQVFETLEEITGYLYISAWPDSLPDLSVFQNLQVIRGRILHNGAYSLTLQGLGISWLGLRSLRELGSGLALIHHNTHLCFVHTVPWDQLFRNPHQALLHTANRPEDECVGEGLACHQLCARGHCWGPGPTQCVNCSQFLRGQECVEECRVLQGLPREYVNARHCLPCHPECQPQNGSVTCFGPEADQCVACAHYKDPPFCVARCPSGVKPDLSYMPIWKFPDEEGACQPCPINCTHSCVDLDDKGCPAEQRASPLTSIXSAVVGILLVVVLGVVFGILIKRRQQKIRKYTMRRLLQETELVEPLTPSGAMPNQAQMRILKETELRKVKVLGSGAFGTVYKGIWIPDGENVKIPVAIKVLRENTSPKANKEILDEAYVMAGVGSPYVSRLLGICLTSTVQLVTQLMPYGCLLDHVRENRGRLGSQDLLNWCMQIAKGMSYLEDVRLVHRDLAARNVLVKSPNHVKITDFGLARLLDIDETEYHADGGKVPIKWMALESILRRRFTHQSDVWSYGVTVWELMTFGAKPYDGIPAREIPDLLEKGERLPQPPICTIDVYMIMVKCWMIDSECRPRFRELVSEFSRMARDPQRFVVIQNEDLGPASPLDSTFYRSLLEDDDMGDLVDAEEYLVPQQGFFCPDPAPGAGGMVHHRHRSSSTRSGGGDLTLGLEPSEEEAPRSPLAPSEGAGSDVFDGDLGMGAAKGLQSLPTHDPSPLQRYSEDPTVPLPSETDGYVAPLTCSPQPEYVNQPDVRPQPPSPREGPLPAARPAGATLERPKTLSPGKNGVVKDVFAFGGAVENPEYLTPQGGAAPQPHPPPAFSPAFDNLYYWDQDPPERGAPPSTFKGTPTAENPEYLGLDVPV

SEQ ID NO: 237 - protein, 820 aa, Homo sapiens
  VARIANT 22: Xaa = R or S
  VARIANT 97, 198: Xaa = G or D
  VARIANT 99, 275: Xaa = Y or C
  VARIANT 165: Xaa = A or S
  VARIANT 190: Xaa = K or E
  VARIANT 192: Xaa = S or G
  VARIANT 250: Xaa = P or R
  VARIANT 605: Xaa = V or M
  VARIANT 664: Xaa = W or R
  VARIANT 717: Xaa = M or R
  VARIANT 770: Xaa = P or S
  VARIANT 816: Xaa = G or R
  VARIANT 820: Xaa = R or C
MWSWKCLLFWAVLVTATLCTAXPSPTLPEQAQPWGAPVEVESFLVHPGDLLQLRCRLRDDVQSINWLRDGVQLAESNRTRITGEEVEVQDSVPADSXLXACVTSSPSGSDTTYFSVNVSDALPSSEDDDDDDDSSSEEKETDNTKPNPVAPYWTSPEKMEKKLHXVPAAKTVKFKCPSSGTPNPTLRWLXNXKEFKPXHRIGGYKVRYATWSIIMDSVVPSDKGNYTCIVENEYGSINHTYQLDVVERSXHRPILQAGLPANKTVALGSNVEFMXKVYSDPQPHIQWLKHIEVNGSKIGPDNLPYVQILKTAGVNTTDKEMEVLHLRNVSFEDAGEYTCLAGNSIGLSHHSAWLTVLEALEERPAVMTSPLYLEIIIYCTGAFLISCMVGSVIVYKMKSGTKKSDFHSQMAVHKLAKSIPLRRQVTVSADSSASMNSGVLLVRPSRLSSSGTPMLAGVSEYELPEDPRWELPRDRLVLGKPLGEGCFGQVVLAEAIGLDKDKPNRVTKVAVKMLKSDATEKDLSDLISEMEMMKMIGKHKNIINLLGACTQDGPLYVIVEYASKGNLREYLQARRPPGLEYCYNPSHNPEEQLSSKDLVSCAYQXARGMEYLASKKCIHRDLAARNVLVTEDNVMKIADFGLARDIHHIDYYKKTTNGRLPVKXMAPEALFDRIYTHQSDVWSFGVLLWEIFTLGGSPYPGVPVEELFKLLKEGHRXDKPSNCTNELYMMMRDCWHAVPSQRPTFKQLVEDLDRIVALTSNQEYLDLSMXLDQYSPSFPDTRSSTCSSGEDSVFSHEPLPEEPCLPRHPAQLANGXLKRX

SEQ ID NO: 238 - protein, 821 aa, Homo sapiens
  VARIANT 6: Xaa = R or P
  VARIANT 20: Xaa = W or C
  VARIANT 31: Xaa = T or I
  VARIANT 105: Xaa = Y or C
  VARIANT 152, 338, 384, 678: Xaa = R or G
  VARIANT 162, 186: Xaa = M or T
  VARIANT 172: Xaa = A or F
  VARIANT 252: Xaa = S or W or L
  VARIANT 253: Xaa = P or S or F
  VARIANT 267: Xaa = S or P
  VARIANT 276: Xaa = F or V
  VARIANT 278: Xaa = C or F
  VARIANT 281: Xaa = Y or C
  VARIANT 289: Xaa = Q or P
  VARIANT 315: Xaa = A or S
  VARIANT 340: Xaa = Y or H
  VARIANT 341: Xaa = T or P
  VARIANT 342: Xaa = C or R or Y or S or F or W
  VARIANT 344: Xaa = A or P or G
  VARIANT 347, 351, 372: Xaa = S or C
  VARIANT 443: Xaa = P or A
  VARIANT 549: Xaa = N or H
  VARIANT 565: Xaa = E or G
  VARIANT 641: Xaa = K or R
  VARIANT 659: Xaa = K or N
  VARIANT 663: Xaa = G or E
MVSWGXFICLVVVTMATLSLARPSFSLVEDXTLEPEEPPTKYQISQPEVYVAAPGESLEVRCLLKDAAVISWTKDGVHLGPNNRTVLIGEYLQIKGATPRDSGLXACTASRTVDSETWYFMVNVTDAISSGDDEDDTDGAEDFVSENSNNKXAPYWTNTEKXEKRLHAVPAXNTVKFRCPAGGNPXPTMRWLKNGKEFKQEHRIGGYKVRNQHWSLIMESVVPSDKGNYTCVVENEYGSINHTYHLDVVERXXHRPILQAGLPANAXTVVGGDVEXVXKVXSDAQPHIXXIKHVEKNGSKYGPDGLPYLKVLKAXGVNTTDKEIEVLYIRNVTFEDAXEXXXLXGNXIGIXFHSAWLTVLPAPGREKEITAXPDXLEIAIYCIXVFLIACMVVTVILCRMKNTTKKPDFSSQPAVHKLTKRIPLRRQVTVSAESSSSMNSNTXLVRITTRLSSTADTPMLAGVSEYELPEDPKWEFPRDKLTLGKPLGEGCFGQVVMAEAVGIDKDKPKEAVTVAVKMLKDDATEKDLSDLVSEMEMMKMIGKHKNIIXLLGACTQDGPLYVIVXYASKGNLREYLRARRPPGMEYSYDINRVPEEQMTFKDLVSCTYQLARGMEYLASQKCIHRDLAARNVLVTENNVMXIADFGLARDINNIDYYKXTTNXRLPVKWMAPEALFDXVYTHQSDVWSFGVLMWEIFTLGGSPYPGIPVEELFKLLKEGHRMDKPANCTNELYMMMRDCWHAVPSQRPTFKQLVEDLDRILTLTTNEEYLDLSQPLEQYSPSYPDTRSSCSSGDDSVFSPDPMPYEPCLPQYPHINGSVKT

SEQ ID NO: 239 - protein, 806 aa, Homo sapiens
  VARIANT 65: Xaa = G or R
  VARIANT 250: Xaa = P or R
  VARIANT 383: Xaa = F or C
MGAPACALALCVAVAIVAGASSESLGTEQRVVGRAAEVPGPEPGQQEQLVFGSGDAVELSCPPPXGGPMGPTVWVKDGTGLVPSERVLVGPQRLQVLNASHEDSGAYSCRQRLTQRVLCHFSVRVTDAPSSGDDEDGEDEAEDTGVDTGAPYWTRPERMDKKLLAVPAANTVRFRCPAAGNPTPSISWLKNGREFRGEHRIGGIKLRHQQWSLVMESVVPSDRGNYTCVVENKFGSIRQTYTLDVLERSXHRPILQAGLPANQTAVLGSDVEFHCKVYSDAQPHIQWLKHVEVNGSKVGPDGTPYVTVLKTAGANTTDKELEVLSLHNVTFEDAGEYTCLAGNSIGFSHHSAWLVVLPAEEELVEADEAGSVYAGILSYGVGXFLFILVVAAVTLCRLRSPPKKGLGSPTVHKISRFPLKRQVSLESNASMSSNTPLVRIARLSSGEGPTLANVSELELPADPKWELSRARLTLGKPLGEGCFGQVVMAEAIGIDKDRAAKPVTVAVKMLKDDATDKDLSDLVSEMEMMKMIGKHKNIINLLGACTQGGPLYVLVEYAAKGNLREFLRARRPPGLDYSFDTCKPPEEQLTFKDLVSCAYQVARGMEYLASQKCIHRDLAARNVLVTEDNVMKIADFGLARDVHNLDYYKKTTNGRLPVKWMAPEALFDRVYTHQSDVWSFGVLLWEIFTLGGSPYPGIPVEELFKLLKEGHRMDKPANCTHDLYMIMRECWHAAPSQRPTFKQLVEDLDRVLTVTSTDEYLDLSAPFEQYSPGGQDTPSSSSSGDDSVFAHDLLPPAPPSSGGSRT

SEQ ID NO: 240 - protein, 802 aa, Homo sapiens
  VARIANT 10: Xaa = V or I
  VARIANT 136: Xaa = P or L
  VARIANT 275: Xaa = S or R
  VARIANT 297: Xaa = D or V
  VARIANT 388: Xaa = G or R
  VARIANT 616: Xaa = R or L
MRLLLALLGXLLSVPGPPVLSLEASEEVELEPCLAPSLEQQEQELTVALGQPVRLCCGRAERGGHWYKEGSRLAPAGRVRGWRGRLEIASFLPEDAGRYLCLARGSMIVLQNLTLITGDSLTSSNDDEDPKSHRDXSNRHSYPQQAPYWTHPQRMEKKLHAVPAGNTVKFRCPAAGNPTPTIRWLKDGQAFHGENRIGGIRLRHQHWSLVMESVVPSDRGTYTCLVENAVGSIRYNYLLDVLERSPHRPILQAGLPANTTAVVGSDVELLCKVYXDAQPHIQWLKHIVINGSSFGAXGFPYVQVLKTADINSSEVEVLYLRNVSAEDAGEYTCLAGNSIGLSYQSAWLTVLPEEDPTWTAAAPEARYTDIILYASGSLALAVLLLLAXLYRGQALHGRHPRPPATVQKLSRFPLARQFSLESGSSGKSSSSLVRGVRLSSSGPALLAGLVSLDLPLDPLWEFPRDRLVLGKPLGEGCFGQVVRAEAFGMDPARPDQASTVAVKMLKDNASDKDLADLVSEMEVMKLIGRHKNIINLLGVCTQEGPLYVIVECAAKGNLREFLRARRPPGPDLSPDGPRSSEGPLSFPVLVSCAYQVARGMQYLESRKCIHRDLAAXNVLVTEDNVMKIADFGLARGVHHIDYYKKTSNGRLPVKWMAPEALFDRVYTHQSDVWSFGILLWEIFTLGGSPYPGIPVEELFSLLREGHRMDRPPHCPPELYGLMRECWHAAPSQRPTFKQLVEALDKVLLAVSEEYLDLRLTFGPYSPSGGDASSTCSSSDSVFSHDPLPLGSSSFPFGSGVQT

SEQ ID NO: 241 - protein, 993 aa, Homo sapiens
  VARIANT 835: Xaa = D or Y or H or F
  VARIANT 836: Xaa = I or S
  VARIANT 841: Xaa = N or I
  VARIANT 842: Xaa = Y or H
MPALARDAGTVPLLVVFSAMIFGTITNQDLPVIKCVLINHKNNDSSVGKSSSYPMVSESPEDLGCALRPQSSGTVYEAAAVEVDVSASITLQVLVDAPGNISCLWVFKHSSLNCQPHFDLQNRGVVSMVILKMTETQAGEYLLFIQSEATNYTILFTVSIRNTLLYTLRRPYFRKMENQDALVCISESVPEPIVEWVLCDSQGESCKEESPAVVKKEEKVLHELFGTDIRCCARNELGRECTRLFTIDLNQTPQTTLPQLFLKVGEPLWIRCKAVHVNHGFGLTWELENKALEEGNYFEMSTYSTNRTMIRILFAFVSSVARNDTGYYTCSSSKHPSQSALVTIVGKGFINATNSSEDYEIDQYEEFCFSVRFKAYPQIRCTWTFSRKSFPCEQKGLDNGYSISKFCNHKHQPGEYIFHAENDDAQFTKMFTLNIRRKPQVLAEASASQASCFSDGYPLPSWTWKKCSDKSPNCTEEITEGVWNRKANRKVFGQWVSSSTLNMSEAIKGFLVKCCAYNSLGTSCETILLNSPGPFPFIQDNISFYATIGVCLLFIVVLTLLICHKYKKQFRYESQLQMVQVTGSSDNEYFYVDFREYEYDLKWEFPRENLEFGKVLGSGAFGKVMNATAYGISKTGVSIQVAVKMLKEKADSSEREALMSELKMMTQLGSHENIVNLLGACTLSGPIYLIFEYCCYGDLLNYLRSKREKFHRTWTEIFKEHNFSFYPTFQSHPNSSMPGSREVQIHPDSDQISGLHGNSFHSEDEIEYENQKRLEEEEDLNVLTFEDLLCFAYQVAKGMEFLEFKSCVHRDLAARNVLVTHGKVVKICDFGLARXXMSDSXXVVRGNARLPVKWMAPESLFEGIYTIKSDVWSYGILLWEIFSLGVNPYPGIPVDANFYKLIQNGFKMDQPFYATEEIYIIMQSCWAFDSRKRPSFPNLTSFLGCQLADAEEAMYQNVDGRVSECPHTYQNRRPFSREMDLGLLSPQAQVEDS

SEQ ID NO: 242 - protein, 976 aa, Homo sapiens
  VARIANT 541: Xaa = M or L or V
  VARIANT 557: Xaa = W or R
  VARIANT 664: Xaa = G or R
  VARIANT 788, 136: Xaa = C or R
  VARIANT 802: Xaa = T or I
  VARIANT 816, 820: Xaa = D or V or H or Y
  VARIANT 822: Xaa = N or Y or K
  VARIANT 823: Xaa = Y or D or C
  VARIANT 835: Xaa = W or R
  VARIANT 869: Xaa = P or S
  VARIANT 900: Xaa = Y or F
  VARIANT 52: Xaa = D or N
  VARIANT 178: Xaa = A or T
MRGARGAWDFLCVLLLLLRVQTGSSQPSVSPGEPSPPSIHPGKSDLIVRVGXEIRLLCTDPGFVKWTFEILDETNENKQNEWITEKAEATNTGKYTCTNKHGLSNSIYVFVRDPAKLFLVDRSLYGKEDNDTLVRXPLTDPEVTNYSLKGCQGKPLPKDLRFIPDPKAGIMIKSVKRXYHRLCLHCSVDQEGKSVLSEKFILKVRPAFKAVPVVSVSKASYLLREGEEFTVTCTIKDVSSSVYSTWKRENSQTKLQEKYNSWHHGDFNYERQATLTISSARVNDSGVFMCYANNTFGSANVTTTLEVVDKGFINIFPMINTTVFVNDGENVDLIVEYEAFPKPEHQQWIYMNRTFTDKWEDYPKSENESNIRYVSELHLTRLKGTEGGTYTFLVSNSDVNAAIAFNVYVNTKPEILTYDRLVNGMLQCVAAGFPEPTIDWYFCPGTEQRCSASVLPVDVQTLNSSGPPFGKLVVQSSIDSSAFKHNGTVECKAYNDVGKTSAYFNFAFKGNNKEQIHPHTLFTPLLIGFVIVAGMMCIIVXILTYKYLQKPMYEVQXKVVEEINGNNYVYIDPTQLPYDHKWEFPRNRLSFGKTLGAGAFGKVVEATAYGLIKSDAAMTVAVKMLKPSAHLTEREALMSELKVLSYLGNHMNIVNLLGACTIGXPTLVITEYCCYGDLLNFLRRKRDSFICSKQEDHAEAALYKNLLHSKESSCSDSTNEYMDMKPGVSYVVPTKADKRRSVRIGSYIERDVTPAIMEDDELALDLEDLLSFSYQVAKGMAFLASKNXIHRDLAARNILLXHGRITKICDFGLARXIKNXSXXVVKGNARLPVKXMAPESIFNCVYTFESDVWSYGIFLWELFSLGSSXYPGMPVDSKFYKMIKEGFRMLSPEHAPAEMXDIMKTCWDADPLKRPTFKQIVQLIEKQISESTNHIYSNLANCSPNRQKPVVDHSVRINSVGSTASSSQPLLVHDDV

SEQ ID NO: 243 - protein, 1390 aa, Homo sapiens
  VARIANT 37, 145, 158, 237: Xaa = V or A
  VARIANT 39, 1250: Xaa = M or T
  VARIANT 42: Xaa = Q or R
  VARIANT 113, 508: Xaa = K or R
  VARIANT 114, 382: Xaa = D or N
  VARIANT 148, 476, 1094: Xaa = H or R
  VARIANT 151: Xaa = T or P
  VARIANT 168: Xaa = E or D
  VARIANT 193: Xaa = I or T
  VARIANT 216: Xaa = V or L
  VARIANT 276, 511, 729: Xaa = T or A
  VARIANT 314: Xaa = F or L
  VARIANT 337: Xaa = L or P
  VARIANT 340: Xaa = D or V
  VARIANT 400: Xaa = R or G
  VARIANT 481: Xaa = L or M
  VARIANT 500: Xaa = D or G
  VARIANT 501, 542: Xaa = Y or H
  VARIANT 622: Xaa = L or S
  VARIANT 720: Xaa = F or S
  VARIANT 1100: Xaa = N or Y
  VARIANT 1230: Xaa = C or Y
  VARIANT 1235: Xaa = Y or D
MKAPAVLAPGILVLLFTLVQRSNGECKEALAKSEMNXNXKYXLPNFTAETPIQNVILHEHHIFLGATNYIYVLNEEDLQKVAEYKTGPVLEHPDCFPCQDCSSKANLSGGVWXXNINMALVVDTYYDDQLISCGSVNRGTCQRHXFPXNHXADIQSEXHCIFSPQIEXPSQCPDCVVSALGAKVLSSVKDRFXNFFVGNTINSSYFPDHPLHSISXRRLKETKDGFMFLTDQSYIDXLPEFRDSYPIKYVHAFESNNFIYFLTVQRETLDAQTFHXRIIRFCSINSGLHSYMEMPLECILTEKRKKRSTKKEVXNILQAAYVSKPGAQLARQIGASXNDXILFGVFAQSKPDSAEPMDRSAMCAFPIKYVNDFFNKIVNKNXVRCLQHFYGPNHEHCFNXTLLRNSSGCEARRDEYRTEFTTALQRVDLFMGQFSEVLLTSISTFIKGDLTIANLGTSEGRFMQVVVSRSGPSTPXVNFLXDSHPVSPEVIVEHTLNQNXXTLVITGXKIXKIPLNGLGCRHFQSCSQCLSAPPFVQCGWCXDKCVRSEECLSGTWTQQICLPAIYKVFPNSAPLEGGTRLTICGWDFGFRRNNKFDLKKTRVLLGNESCTLTLSESTMNTXKCTVGPAMNKHFNMSIIISNGHGTTQYSTFSYVDPVITSISPKYGPMAGGTLLTLTGNYLNSGNSRHISIGGKTCTLKSVSNSILECYTPAQTISTEXAVKLKIDLXNRETSIFSYREDPIVYEIHPTKSFISGGSTITGVGKNLNSVSVPRMVINVHEAGRNFTVACQHRSNSEIICCXTPSLQQLNLQLPLKTKAFFMLDGILSKYFDLIYVHNPVFKPFEKPVMISMGNENVLEIKGNDIDPEAVKGEVLKVGNKSCENIHLHSEAVLCTVPNDLLKLNSELNIEWKQAISSTVLGKVIVQPDQNFTGLIAGVVSISTALLLLLGFFLWLKKRKQIKDLGSELVRYDARVHTPHLDRLVSARSVSPTTEMVSNESVDYRATFPEDQFPNSSQNGSCRQVQYPLTDMSPILTSGDSDISSPLLQNTVHIDLSALNPELVQAVQHVVIGPSSLIVHFNEVIGRGHFGCVYXGTLLDXDGKKIHCAVKSLNRITDIGEVSQFLTEGIIMKDFSHPNVLSLLGICLRSEGSPLVVLPYMKHGDLRNFIRNETHNPTVKDLIGFGLQVAKGMKYLASKKFVHRDLAARNCMLDEKFTVKVADFGLARDMXDKEYXSVHNKTGAKLPVKWXALESLQTQKFTTKSDVWSFGVLLWELMTRGAPPYPDVNTFDITVYLLQGRRLLQPEYCPDPLYEVMLKCWHPKAEMRPSFSELVSRISAIFSTFIGEHYVHVNATYVNVKCVAPYPSLLSSEDNADDEVDTRPASFWETS

SEQ ID NO: 244 - protein, 1106 aa, Homo sapiens
  VARIANT 29: Xaa = I or F
  VARIANT 194: Xaa = I or T
  VARIANT 345: Xaa = P or S
MRLPGAMPALALKGELLLLSLLLLLEPQXSQGLVVTPPGPELVLNVSSTFVLTCSGSAPVVWERMSQEPPQEMAKAQDGTFSSVLTLTNLTGLDTGEYFCTHNDSRGLETDERKRLYIFVPDPTVGFLPNDAEELFIFLTEITEITIPCRVTDPQLVVTLHEKKGDVALPVPYDHQRGFSGIFEDRSYICKTTXGDREVDSDAYYVYRLQVSSINVSVNAVQTVVRQGENITLMCIVIGNEVVNFEWTYPRKESGRLVEPVTDFLLDMPYHIRSILHIPSAELEDSGTYTCNVTESVNDHQDEKAINITVVESGYVRLLGEVGTLQFAELHRSRTLQVVFEAYPXPTVLWFKDNRTLGDSSAGEIALSTRNVSETRYVSELTLVRVKVAEAGHYTMRAFHEDAEVQLSFQLQINVPVRVLELSESHPDSGEQTVRCRGRGMPQPNIIWSACRDLKRCPRELPPTLLGNSSEEESQLETNVTYWEEEQEFEVVSTLRLQHVDRPLSVRCTLRNAVGQDTQEVIVVPHSLPFKVVVISAILALVVLTIISLIILIMLWQKKPRYEIRWKVIESVSSDGHEYIYVDPMQLPYDSTWELPRDQLVLGRTLGSGAFGQVVEATAHGLSHSQATMKVAVKMLKSTARSSEKQALMSELKIMSHLGPHLNVVNLLGACTKGGPIYIITEYCRYGDLVDYLHRNKHTFLQHHSDKRRPPSAELYSNALPVGLPLPSHVSLTGESDGGYMDMSKDESVDYVPMLDMKGDVKYADIESSNYMAPYDNYVPSAPERTCRATLINESPVLSYMDLVGFSYQVANGMEFLASKNCVHRDLAARNVLICEGKLVKICDFGLARDIMRDSNYISKGSTFLPLKWMAPESIFNSLYTTLSDVWSFGILLWEIFTLGGTPYPELPMNEQFYNAIKRGYRMAQPAHASDEIYEIMQKCWEEKFEIRPPFSQLVLLLERLLGEGYKKKYQQVDEEFLRSDHPAILRSQARLPGFHGLRSPLDTSSVLYTAVQPNEGDNDYIIPLPDPKPEVADEGPLEGSPSLASSTLNEVNTSSTISCDSPLEPQDEPEPEPQLELQVEPEPELEQLPDSGCPAPRAEAEDSFL

SEQ ID NO: 245 - protein, 1400 aa, Homo sapiens
  VARIANT 113, 1195: Xaa = G or S
  VARIANT 209: Xaa = G or A
  VARIANT 322, 523: Xaa = Q or R
  VARIANT 440: Xaa = N or S
  VARIANT 946: Xaa = V or M
  VARIANT 1232: Xaa = R or G or D or V
  VARIANT 1254: Xaa = M or T
  VARIANT 1335: Xaa = R or G
MELLPPLPQSFLLLLLLPAKPAAGEDWQCPRTPYAASRDFDVKYVVPSFSAGGLVQAMVTYEGDRNESAVFVAIRNRLHVLGPDLKSVQSLATGPAGDPGCQTCAACGPGPHXPPGDTDTKVLVLDPALPALVSCGSSLQGRCFLHDLEPQGTAVHLAAPACLFSAHHNRPDDCPDCVASPLGTRVTVVEQGQASYFYVASSLDAAVAXSFSPRSVSIRRLKADASGFAPGFVALSVLPKHLVSYSIEYVHSFHTGAFVYFLTVQPASVTDDPSALHTRLARLSATEPELGDYRELVLDCRFAPKRRRRGAPEGGQPYPVLXVAHSAPVGAQLATELSIAEGQEVLFGVFVTGKDGGPGVGPNSVVCAFPIDLLDTLIDEGVERCCESPVHPGLRRGLDFFQSPSFCPNPPGLEALSPNTSCRHFPLLVSSSFSRVDLFXGLLGPVQVTALYVTRLDNVTVAHMGTMDGRILQVELVRSLNYLLYVSNFSLGDSGQPVQRDVSRLGDHLLFASGDQVFQVPIXGPGCRHFLTCGRCLRAWHFMGCGWCGNMCGQQKECPGSWQQDHCPPKLTEFHPHSGPLRGSTRLTLCGSNFYLHPSGLVPEGTHQVTVGQSPCRPLPKDSSKLRPVPRKDFVEEFECELEPLGTQAVGPTNVSLTVTNMPPGKHFRVDGTSVLRGFSFMEPVLIAVQPLFGPRAGGTCLTLEGQSLSVGTSRAVLVNGTECLLARVSEGQLLCATPPGATVASVPLSLQVGGAQVPGSWTFQYREDPVVLSISPNCGYINSHITICGQHLTSAWHLVLSFHDGLRAVESRCERQLPEQQLCRLPEYVVRDPQGWVAGNLSARGDGAAGFTLPGFRFLPPPHPPSANLVPLKPEEHAIKFEYIGLGAVADCVGINVTVGGESCQHEFRGDMVVCPLPPSLQLGQDGAPLQVCVDGECHILGRVXRPGPDGVPQSTLLGILLPLLLLVAALATALVFSYWWRRKQLVLPPNLNDLASLDQTAGATPLPILYSGSDYRSGLALPAIDGLDSTTCVHGASFSDSEDESCVPLLRKESIQLRDLDSALLAEVKDVLIPHERVVTHSDRVIGKGHFGVVYHGEYIDQAQNRIQCAIKSLSRITEMQQVEAFLREGLLMRGLNHPNVLALIGIMLPPEGLPHVLLPYMCHGDLLQFIRSPQRNPTVKDLISFGLQVARXMEYLAEQKFVHRDLAARNCMLDESFTVKVADFGLARXILDREYYSVQQHRHARLPVKWXALESLQTYRFTTKSDVWSFGVLLWELLTRGAPPYRHIDPFDLTHFLAQGRRLPQPEYCPDSLYQVMQQCWEADPAVRPTFXVLVGEVEQIVSALLGDHYVQLPATYMNLGPSTSHEMNVRPEQPQFSPMPGNVRRPRPLSEPPRPT

SEQ ID NO: 246 - protein, 1124 aa, Homo sapiens
  VARIANT 346: Xaa = P or Q
  VARIANT 486: Xaa = V or I
  VARIANT 695: Xaa = I or T
  VARIANT 724: Xaa = A or T
  VARIANT 849: Xaa = R or W
MDSLASLVLCGVSLLLSGTVEGAMDLILINSLPLVSDAETSLTCIASGWRPHEPITIGRDFEALMNQHQDPLEVTQDVTREWAKKVVWKREKASKINGAYFCEGRVRGEAIRIRTMKMRQQASFLPATLTMTVDKGDNVNISFKKVLIKEEDAVIYKNGSFIHSVPRHEVPDILEVHLPHAQPQDAGVYSARYIGGNLFTSAFTRLIVRRCEAQKWGPECNHLCTACMNNGVCHEDTGECICPPGFMGRTCEKACELHTFGRTCKERCSGQEGCKSYVFCLPDPYGCSCATGWKGLQCNEACHPGFYGPDCKLRCSCNNGEMCDRFQGCLCSPGWQGLQCEREGIXRMTPKIVDLPDHIEVNSGKFNPICKASGWPLPTNEEMTLVKPDGTVLHPKDFNHTDHFSVAIFTIHRILPPDSGVWVCSVNTVAGMVEKPFNISVKVLPKPLNAPNVIDTGHNFAVINISSEPYFGDGPIKSKKLLYKPXNHYEAWQHIQVTNEIVTLNYLEPRTEYELCVQLVRRGEGGEGHPGPVRRFTTASIGLPPPRGLNLLPKSQTTLNLTWQPIFPSSEDDFYVEVERRSVQKSDQQNIKVPGNLTSVLLNNLHPREQYVVRARVNTKAQGEWSEDLTAWTLSDILPPQPENIKISNITHSSAVISWTILDGYSISSITIRYKVQGKNEDQHVDVKIKNATIXQYQLKGLEPETAYQVDIFAENNIGSSNPXFSHELVTLPESQAPADLGGGKMLLIAILGSAGMTCLTVLLAFLIILQLKRANVQRRMAQAFQNVREEPAVQFNSGTLALNRKVKNNPDPTIYPVLDWNDIKFQDVIGEGNFGQVLKARIKKDGLXMDAAIKRMKEYASKDDHRDFAGELEVLCKLGHHPNIINLLGACEHRGYLYLAIEYAPHGNLLDFLRKSRVLETDPAFAIANSTASTLSSQQLLHFAADVARGMDYLSQKQFIHRDLAARNILVGENYVAKIADFGLSRGQEVYVKKTMGRLPVRWMAIESLNYSVYTTNSDVWSYGVLLWEIVSLGGTPYCGMTCAELYEKLPQGYRLEKPLNCDDEVYDLMRQCWREKPYERPSFAQILVSLNRMLEERKTYVNTTLYEKFTYAGIDCSAEEAA

SEQ ID NO: 247 - protein, 1138 aa, Homo sapiens
  VARIANT 142: Xaa = A or T
  VARIANT 1109: Xaa = R or C
MVWRVPPFLLPILFLASHVGAAVDLTLLANLRLTDPQRFFLTCVSGEAGAGRGSDAWGPPLLLEKDDRIVRTPPGPPLRLARNGSHQVTLRGFSKPSDLVGVFSCVGGAGARRTRVIYVHNSPGAHLLPDKVTHTVNKGDTXVLSARVHKEKQTDVIWKSNGSYFYTLDWHEAQDGRFLLQLPNVQPPSSGIYSATYLEASPLGSAFFRLIVRGCGAGRWGPGCTKECPGCLHGGVCHDHDGECVCPPGFTGTRCEQACREGRFGQSCQEQCPGISGCRGLTFCLPDPYGCSCGSGWRGSQCQEACAPGHFGADCRLQCQCQNGGTCDRFSGCVCPSGWHGVHCEKSDRIPQILNMASELEFNLETMPRINCAAAGNPFPVRGSIELRKPDGTVLLSTKAIVEPEKTTAEFEVPRLVLADSGFWECRVSTSGGQDSRRFKVNVKVPPVPLAAPRLLTKQSRQLVVSPLVSFSGDGPISTVRLHYRPQDSTMDWSTIVVDPSENVTLMNLRPKTGYSVRVQLSRPGEGGEGAWGPPTLMTTDCPEPLLQPWLEGWHVEGTDRLRVSWSLPLVPGPLVGDGFLLRLWDGTRGQERRENVSSPQARTALLTGLTPGTHYQLDVQLYHCTLLGPASPPAHVLLPPSGPPAPRHLHAQALSDSEIQLTWKHPEALPGPISKYVVEVQVAGGAGDPLWIDVDRPEETSTIIRGLNASTRYLFRMRASIQGLGDWSNTVEESTLGNGLQAEGPVQESRAAEEGLDQQLILAVVGSVSATCLTILAALLTLVCIRRSCLHRRRTFTYQSGSGEETILQFSSGTLTLTRRPKLQPEPLSYPVLEWEDITFEDLIGEGNFGQVIRAMIKKDGLKMNAAIKMLKEYASENDHRDFAGELEVLCKLGHHPNIINLLGACKNRGYLYIAIEYAPYGNLLDFLRKSRVLETDPAFAREHGTASTLSSRQLLRFASDAANGMQYLSEKQFIHRDLAARNVLVGENLASKIADFGLSRGEEVYVKKTMGRLPVRWMAIESLNYSVYTTKSDVWSFGVLLWEIVSLGGTPYCGMTCAELYEKLPQGYRMEQPRNCDDEVYELMRQCWRDRPYERPPFAQIALQLGXMLEARKAYVNMSLFENFTYAGIDATAEEA

SEQ ID NO: 248 - protein, 455 aa, Homo sapiens
  VARIANT 75: Xaa = P or I
  VARIANT 121: Xaa = R or Q
  VARIANT 305: Xaa = P or T
MGLSTVPDLLLPLVLLELLVGIYPSGVIGLVPHLGDREKRDSVCPQGKYIHPQNNSICCTKCHKGTYLYNDCPGXGQDTDCRECESGSFTASENHLRHCLSCSKCRKEMGQVEISSCTVDXDTVCGCRKNQYRHYWSENLFQCFNCSLCLNGTVHLSCQEKQNTVCTCHAGFFLRENECVSCSNCKKSLECTKLCLPQIENVKGTEDSGTTVLLPLVIFFGLCLLSLLFIGLMYRYQRWKSKLYSIVCGKSTPEKEGELEGTTTKPLAPNPSFSPTPGFTPTLGFSPVPSSTFTSSSTYTPGDCXNFAAPRREVAPPYQGADPILATALASDPIPNPLQKWEDSAHKPQSLDTDDPATLYAVVENVPPLRWKEFVRRLGLSDHEIDRLELQNGRCLREAQYSMLATWRRRTPRREATLELLGRVLRDMDLLGCLEDIEEALCGPAALPPAPSLLR

SEQ ID NO: 249 - protein, 461 aa, Homo sapiens
  VARIANT 187: Xaa = V or M
  VARIANT 196: Xaa = M or R
  VARIANT 232: Xaa = E or K
  VARIANT 236: Xaa = A or T
  VARIANT 264: Xaa = L or P
  VARIANT 295: Xaa = Q or R
MAPVAVWAALAVGLELWAAAHALPAQVAFTPYAPEPGSTCRLREYYDQTAQMCCSKCSPGQHAKVFCTKTSDTVCDSCEDSTYTQLWNWVPECLSCGSRCSSDQVETQACTREQNRICTCRPGWYCALSKQEGCRLCAPLRKCRPGFGVARPGTETSDVVCKPCAPGTFSNTTSSTDICRPHQICNXVAIPGNASXDAVCTSTSPTRSMAPGAVHLPQPVSTRSQHTQPTPXPSTXPSTSFLLPMGPSPPAEGSTGDFALPVGXIVGVTALGLLIIGVVNCVIMTQVKKKPLCLXREAKVPHLPADKARGTQGPEQQHLLITAPSSSSSSLESSASALDRRAPTRNQPQAPGVEASGAGEARASTGSSDSSPGGHGTQVNVTCIVNVCSSSDHSSQCSSQASSTMGDTDSSPSESPKDEQVPFSKEECAFRSQLETPETLLGSTEEKPLPLGVPDAGMKPS

SEQ ID NO: 250 - protein, 1356 aa, Homo sapiens
  VARIANT 297, 952: Xaa = V or I
  VARIANT 349: Xaa = R or K
  VARIANT 392: Xaa = D or N
  VARIANT 472: Xaa = Q or H
  VARIANT 772: Xaa = A or T
  VARIANT 787: Xaa = R or G
  VARIANT 835: Xaa = K or N
  VARIANT 848: Xaa = V or E
  VARIANT 1147: Xaa = P or S
  VARIANT 1210: Xaa = P or A
  VARIANT 1347: Xaa = S or T
MQSKVLLAVALWLCVETRAASVGLPSVSLDLPRLSIQKDILTIKANTTLQITCRGQRDLDWLWPNNQSGSEQRVEVTECSDGLFCKTLTIPKVIGNDTGAYKCFYRETDLASVIYVYVQDYRSPFIASVSDQHGVVYITENKNKTVVIPCLGSISNLNVSLCARYPEKRFVPDGNRISWDSKKGFTIPSYMISYAGMVFCEAKINDESYQSIMYIVVVVGYRIYDVVLSPSHGIELSVGEKLVLNCTARTELNVGIDFNWEYPSSKHQHKKLVNRDLKTQSGSEMKKFLSTLTIDGXTRSDQGLYTCAASSGLMTKKNSTFVRVHEKPFVAFGSGMESLVEATVGERVXIPAKYLGYPPPEIKWYKNGIPLESNHTIKAGHVLTIMEVSERXTGNYTVILTNPISKEKQSHVVSLVVYVPPQIGEKSLISPVDSYQYGTTQTLTCTVYAIPPPHHIHWYWQLEEECANEPSXAVSVTNPYPCEEWRSVEDFQGGNKIEVNKNQFALIEGKNKTVSTLVIQAANVSALYKCEAVNKVGRGERVISFHVTRGPEITLQPDMQPTEQESVSLWCTADRSTFENLTWYKLGPQPLPIHVGELPTPVCKNLDTLWKLNATMFSNSTNDILIMELKNASLQDQGDYVCLAQDRKTKKRHCVVRQLTVLERVAPTITGNLENQTTSIGESIEVSCTASGNPPPQIMWFKDNETLVEDSGIVLKDGNRNLTIRRVRKEDEGLYTCQACSVLGCAKVEAFFIIEGAQEKTNLEIIILVGTXVIAMFFWLLLVIILXTVKRANGGELKTGYLSIVMDPDELPLDEHCERLPYDASKWEFPRDRLXLGKPLGRGAFGQXIEADAFGIDKTATCRTVAVKMLKEGATHSEHRALMSELKILIHIGHHLNVVNLLGACTKPGGPLMVIVEFCKFGNLSTYLRSKRNEFVPYKTKGARFRQGKDYXGAIPVDLKRRLDSITSSQSSASSGFVEEKSLSDVEEEEAPEDLYKDFLTLEHLICYSFQVAKGMEFLASRKCIHRDLAARNILLSEKNVVKICDFGLARDIYKDPDYVRKGDARLPLKWMAPETIFDRVYTIQSDVWSFGVLLWEIFSLGASPYPGVKIDEEFCRRLKEGTRMRAPDYTTPEMYQTMLDCWHGEXSQRPTFSELVEHLGNLLQANAQQDGKDYIVLPISETLSMEEDSGLSLPTSPVSCMEEEEVCDXKFHYDNTAGISQYLQNSKRKSRPVSVKTFEDIPLEEPEVKVIPDDNQTDSGMVLASEELKTLEDRTKLSPSFGGMVPSKSRESVASEGSNQTSGYQSGYHSDDTDTTVYSSEEAELLKLIEIGVQTGSTAQILQPDXGTTLSSPPV

SEQ ID NO: 251 - protein, 1298 aa, Homo sapiens
  VARIANT 24, 134: Xaa = D or G
  VARIANT 149: Xaa = N or D
  VARIANT 494: Xaa = T or A
  VARIANT 854: Xaa = G or S
  VARIANT 890: Xaa = Q or H
  VARIANT 915: Xaa = A or P
  VARIANT 916: Xaa = C or W
  VARIANT 933: Xaa = G or R
  VARIANT 954: Xaa = P or S
  VARIANT 1008: Xaa = P or L
  VARIANT 1041: Xaa = R or Q
  VARIANT 1137: Xaa = P or L
  VARIANT 1164: Xaa = D or E
  VARIANT 1189: Xaa = R or L
  VARIANT 1324: Xaa = R or L
MQRGAALCLRLWLCLGLLDGLVSXYSMTPPTLNITEESHVIDTGDSLSISCRGQHPLEWAWPGAQEAPATGDKDSEDTGVVRDCEGTDARPYCKVLLLHEVHANDTGSYVCYYKYIKARIEGTTAASSYVFVRXFEQPFINKPDTLLVXRKDAMWVPCLVSIPGLNVTLRSQSSVLWPDGQEVVWDDRRGMLVSTPLLHDALYLQCETTWGDQDFLSNPFLVHITGNELYDIQLLPRKSLELLVGEKLVLNCTVWAEFNSGVTFDWDYPGKQAERGKWVPERRSQQTHTELSSILTIHNVSQHDLGSYVCKANNGIQRFRESTEVIVHENPFISVEWLKGPILEATAGDELVKLPVKLAAYPPPEFQWYKDGKALSGRHSPHALVLKEVTEASTGTYTLALWNSAAGLRRNISLELVVNVPPQIHEKEASSPSIYSRHSRQALTCTAYGVPLPLSIQWHWRPWTPCKMFAQRSLRRRQQQDLMPQCRDWRAVTXQDAVNPIESLDTWTEFVEGKNKTVSKLVIQNANVSAMYKCVVSNKVGQDERLIYFYVTTIPDGFTIESKPSEELLEGQPVLLSCQADSYKYEHLRWYRLNLSTLHDAHGNPLLLDCKNVHLFATPLAASLEEVAPGARHATLSLSIPRVAPEHEGHYVCEVQDRRSHDKHCHKKYLSVQALEAPRLTQNLTDLLVNVSDSLEMQCLVAGAHAPSIVWYKDERLLEEKSGVDLADSNQKLSIQRVREEDAGPYLCSVCRPKGCVNSSASVAVEGSEDKGSMEIVILVGTGVIAVFFWVLLLLIFCNMRRPAHADIKTGYLSIIMDPGEVPLEEQCEYLSYDASQWEFPRERLHLGRVLGYXAFGKVVEASAFGIHKGSSCDTVAVKMLKEGATASEXRALMSELKILIHIGNHLNVVNLLGXXTKPQGPLMVIVEFCKYXNLSNFLRAKRDAFSPCAEKSXEQRGRFRAMVELARLDRRRPGSSDRVLFARFSKTEGGARRASPDQEAEDLWLSXLTMEDLVCYSFQVARGMEFLASRKCIHRDLAAXNILLSESDVVKICDFGLARDIYKDPDYVRKGSARLPLKWMAPESIFDKVYTTQSDVWSFGVLLWEIFSLGASPYPGVQINEEFCQRVRDGTRMRAXELATPAIRHIMLNCWSGDPKARPAFSXLVEILGDLLQGRGLQEEEEVCMAPXSSQSSEEGSFSQVSTMALHIAQADAEDSPPSLQRHSLAARYYNWVSFPGCLARGAETRGSSRMKTFEEFPMTPTTYKGSVDNQTDSGMVLASEEFEQIESRHRQESGFR

SEQ ID NO: 252 - protein, 419 aa, Homo sapiens
MELAALCRWGLLLALLPPGAASTQVCTGTDMKLRLPASPETHLDMLRHLYQGCQVVQGNLELTYLPTNASLSFLQDIQEVQGYVLIAHNQVRQVPLQRLRIVRGTQLFEDNYALAVLDNGDPLNNTTPVTGASPGGLRELQLRSLTEILKGGVLIQRNPQLCYQDTILWKDIFHKNNQLALTLIDTNRSRACHPCSPMCKGSRCWGESSEDCQSLTRTVCAGGCARCKGPLPTDCCHEQCAAGCTGPKHSDCLACLHFNHSGICELHCPALVTYNTDTFESMPNPEGRYTFGASCVTACPYNYLSTDVGSCTLVCPLHNQEVTAEDGTQRCEKCSKPCARGTHSLPPRPAAVPVPLRMQPGPAHPVLSFLRPSWDLVSAFYSLPLAPLDPTSVPISPVSVGRGPSPDAHVAVDLSRYEG

SEQ ID NO: 253 - protein, 79 aa, Homo sapiens
GTHSLPPRPAAVPVPLRMQPGPAHPVLSFLRPSWDLVSAFYSLPLAPLSPTSVPISPVSVGRGPDPDAHVAVDLSRYEG

SEQ ID NO: 254 - protein, 419 aa, Homo sapiens
  VARIANT 342: Xaa= Thr or Ser
MELAALCRWGLLLALLPPGAASTQVCTGTDMKLRLPASPETHLDMLRHLYQGCQVVQGNLELTYLPTNASLSFLQDIQEVQGYVLIAHNQVRQVPLQRLRIVRGTQLFEDNYALAVLDNGDPLNNTTPVTGASPGGLRELQLRSLTEILKGGVLIQRNPQLCYQDTILWKDIFHKNNQLALTLIDTNRSRACHPCSPMCKGSRCWGESSEDCQSLTRTVCAGGCARCKGPLPTDCCHEQCAAGCTGPKHSDCLACLHFNHSGICELHCPALVTYNTDTFESMPNPEGRYTFGASCVTACPYNYLSTDVGSCTLVCPLHNQEVTAEDGTQRCEKCSKPCARGXHSLPPRPAAVPVPLRMQPGPAHPVLSFLRPSWDLVSAFYSLPLAPLSPTSVPISPVSVGRGPDPDAHVAVDLSRYEG

SEQ ID NO: 255 - protein, 419 aa, Homo sapiens
  VARIANT 345: Xaa= Leu or Pro
MELAALCRWGLLLALLPPGAASTQVCTGTDMKLRLPASPETHLDMLRHLYQGCQVVQGNLELTYLPTNASLSFLQDIQEVQGYVLIAHNQVRQVPLQRLRIVRGTQLFEDNYALAVLDNGDPLNNTTPVTGASPGGLRELQLRSLTEILKGGVLIQRNPQLCYQDTILWKDIFHKNNQLALTLIDTNRSRACHPCSPMCKGSRCWGESSEDCQSLTRTVCAGGCARCKGPLPTDCCHEQCAAGCTGPKHSDCLACLHFNHSGICELHCPALVTYNTDTFESMPNPEGRYTFGASCVTACPYNYLSTDVGSCTLVCPLHNQEVTAEDGTQRCEKCSKPCARGTHSXPPRPAAVPVPLRMQPGPAHPVLSFLRPSWDLVSAFYSLPLAPLSPTSVPISPVSVGRGPDPDAHVAVDLSRYEG

SEQ ID NO: 256 - protein, 419 aa, Homo sapiens
  VARIANT 346: Xaa= Pro or Leu
MELAALCRWGLLLALLPPGAASTQVCTGTDMKLRLPASPETHLDMLRHLYQGCQVVQGNLELTYLPTNASLSFLQDIQEVQGYVLIAHNQVRQVPLQRLRIVRGTQLFEDNYALAVLDNGDPLNNTTPVTGASPGGLRELQLRSLTEILKGGVLIQRNPQLCYQDTILWKDIFHKNNQLALTLIDTNRSRACHPCSPMCKGSRCWGESSEDCQSLTRTVCAGGCARCKGPLPTDCCHEQCAAGCTGPKHSDCLACLHFNHSGICELHCPALVTYNTDTFESMPNPEGRYTFGASCVTACPYNYLSTDVGSCTLVCPLHNQEVTAEDGTQRCEKCSKPCARGTHSLXPRPAAVPVPLRMQPGPAHPVLSFLRPSWDLVSAFYSLPLAPLSPTSVPISPVSVGRGPDPDAHVAVDLSRYEG

SEQ ID NO: 257 - protein, 419 aa, Homo sapiens
  VARIANT 356: Xaa= Leu or Gln
MELAALCRWGLLLALLPPGAASTQVCTGTDMKLRLPASPETHLDMLRHLYQGCQVVQGNLELTYLPTNASLSFLQDIQEVQGYVLIAHNQVRQVPLQRLRIVRGTQLFEDNYALAVLDNGDPLNNTTPVTGASPGGLRELQLRSLTEILKGGVLIQRNPQLCYQDTILWKDIFHKNNQLALTLIDTNRSRACHPCSPMCKGSRCWGESSEDCQSLTRTVCAGGCARCKGPLPTDCCHEQCAAGCTGPKHSDCLACLHFNHSGICELHCPALVTYNTDTFESMPNPEGRYTFGASCVTACPYNYLSTDVGSCTLVCPLHNQEVTAEDGTQRCEKCSKPCARGTHSLPPRPAAVPVPXRMQPGPAHPVLSFLRPSWDLVSAFYSLPLAPLSPTSVPISPVSVGRGPDPDAHVAVDLSRYEG

SEQ ID NO: 258 - protein, 419 aa, Homo sapiens
  VARIANT 358: Xaa= Met or Leu
MELAALCRWGLLLALLPPGAASTQVCTGTDMKLRLPASPETHLDMLRHLYQGCQVVQGNLELTYLPTNASLSFLQDIQEVQGYVLIAHNQVRQVPLQRLRIVRGTQLFEDNYALAVLDNGDPLNNTTPVTGASPGGLRELQLRSLTEILKGGVLIQRNPQLCYQDTILWKDIFHKNNQLALTLIDTNRSRACHPCSPMCKGSRCWGESSEDCQSLTRTVCAGGCARCKGPLPTDCCHEQCAAGCTGPKHSDCLACLHFNHSGICELHCPALVTYNTDTFESMPNPEGRYTFGASCVTACPYNYLSTDVGSCTLVCPLHNQEVTAEDGTQRCEKCSKPCARGTHSLPPRPAAVPVPLRXQPGPAHPVLSFLRPSWDLVSAFYSLPLAPLSPTSVPISPVSVGRGPDPDAHVAVDLSRYEG

SEQ ID NO: 259 - protein, 419 aa, Homo sapiens
  VARIANT 361: Xaa= Gly, Asp, Ala, or Val
MELAALCRWGLLLALLPPGAASTQVCTGTDMKLRLPASPETHLDMLRHLYQGCQVVQGNLELTYLPTNASLSFLQDIQEVQGYVLIAHNQVRQVPLQRLRIVRGTQLFEDNYALAVLDNGDPLNNTTPVTGASPGGLRELQLRSLTEILKGGVLIQRNPQLCYQDTILWKDIFHKNNQLALTLIDTNRSRACHPCSPMCKGSRCWGESSEDCQSLTRTVCAGGCARCKGPLPTDCCHEQCAAGCTGPKHSDCLACLHFNHSGICELHCPALVTYNTDTFESMPNPEGRYTFGASCVTACPYNYLSTDVGSCTLVCPLHNQEVTAEDGTQRCEKCSKPCARGTHSLPPRPAAVPVPLRMQPXPAHPVLSFLRPSWDLVSAFYSLPLAPLSPTSVPISPVSVGRGPDPDAHVAVDLSRYEG

SEQ ID NO: 260 - protein, 419 aa, Homo sapiens
  VARIANT 376: Xaa= Leu or Ile
MELAALCRWGLLLALLPPGAASTQVCTGTDMKLRLPASPETHLDMLRHLYQGCQVVQGNLELTYLPTNASLSFLQDIQEVQGYVLIAHNQVRQVPLQRLRIVRGTQLFEDNYALAVLDNGDPLNNTTPVTGASPGGLRELQLRSLTEILKGGVLIQRNPQLCYQDTILWKDIFHKNNQLALTLIDTNRSRACHPCSPMCKGSRCWGESSEDCQSLTRTVCAGGCARCKGPLPTDCCHEQCAAGCTGPKHSDCLACLHFNHSGICELHCPALVTYNTDTFESMPNPEGRYTFGASCVTACPYNYLSTDVGSCTLVCPLHNQEVTAEDGTQRCEKCSKPCARGTHSLPPRPAAVPVPLRMQPGPAHPVLSFLRPSWDXVSAFYSLPLAPLSPTSVPISPVSVGRGPDPDAHVAVDLSRYEG

SEQ ID NO: 261 - protein, 419 aa, Homo sapiens
  VARIANT 394: Xaa= Pro or Arg
MELAALCRWGLLLALLPPGAASTQVCTGTDMKLRLPASPETHLDMLRHLYQGCQVVQGNLELTYLPTNASLSFLQDIQEVQGYVLIAHNQVRQVPLQRLRIVRGTQLFEDNYALAVLDNGDPLNNTTPVTGASPGGLRELQLRSLTEILKGGVLIQRNPQLCYQDTILWKDIFHKNNQLALTLIDTNRSRACHPCSPMCKGSRCWGESSEDCQSLTRTVCAGGCARCKGPLPTDCCHEQCAAGCTGPKHSDCLACLHFNHSGICELHCPALVTYNTDTFESMPNPEGRYTFGASCVTACPYNYLSTDVGSCTLVCPLHNQEVTAEDGTQRCEKCSKPCARGTHSLPPRPAAVPVPLRMQPGPAHPVLSFLRPSWDLVSAFYSLPLAPLSPTSVXISPVSVGRGPDPDAHVAVDLSRYEG

SEQ ID NO: 262 - protein, 419 aa, Homo sapiens
  VARIANT 404: Xaa= Pro or Leu
MELAALCRWGLLLALLPPGAASTQVCTGTDMKLRLPASPETHLDMLRHLYQGCQVVQGNLELTYLPTNASLSFLQDIQEVQGYVLIAHNQVRQVPLQRLRIVRGTQLFEDNYALAVLDNGDPLNNTTPVTGASPGGLRELQLRSLTEILKGGVLIQRNPQLCYQDTILWKDIFHKNNQLALTLIDTNRSRACHPCSPMCKGSRCWGESSEDCQSLTRTVCAGGCARCKGPLPTDCCHEQCAAGCTGPKHSDCLACLHFNHSGICELHCPALVTYNTDTFESMPNPEGRYTFGASCVTACPYNYLSTDVGSCTLVCPLHNQEVTAEDGTQRCEKCSKPCARGTHSLPPRPAAVPVPLRMQPGPAHPVLSFLRPSWDLVSAFYSLPLAPLSPTSVPISPVSVGRGXDPDAHVAVDLSRYEG

SEQ ID NO: 263 - protein, 419 aa, Homo sapiens
  VARIANT 413: Xaa= Asp, His or Asn
MELAALCRWGLLLALLPPGAASTQVCTGTDMKLRLPASPETHLDMLRHLYQGCQVVQGNLELTYLPTNASLSFLQDIQEVQGYVLIAHNQVRQVPLQRLRIVRGTQLFEDNYALAVLDNGDPLNNTTPVTGASPGGLRELQLRSLTEILKGGVLIQRNPQLCYQDTILWKDIFHKNNQLALTLIDTNRSRACHPCSPMCKGSRCWGESSEDCQSLTRTVCAGGCARCKGPLPTDCCHEQCAAGCTGPKHSDCLACLHFNHSGICELHCPALVTYNTDTFESMPNPEGRYTFGASCVTACPYNYLSTDVGSCTLVCPLHNQEVTAEDGTQRCEKCSKPCARGTHSLPPRPAAVPVPLRMQPGPAHPVLSFLRPSWDLVSAFYSLPLAPLSPTSVPISPVSVGRGPDPDAHVAVXLSRYEG

SEQ ID NO: 264 - protein, 419 aa, Homo sapiens
  VARIANT 357: Xaa= Arg or Cys
MELAALCRWGLLLALLPPGAASTQVCTGTDMKLRLPASPETHLDMLRHLYQGCQVVQGNLELTYLPTNASLSFLQDIQEVQGYVLIAHNQVRQVPLQRLRIVRGTQLFEDNYALAVLDNGDPLNNTTPVTGASPGGLRELQLRSLTEILKGGVLIQRNPQLCYQDTILWKDIFHKNNQLALTLIDTNRSRACHPCSPMCKGSRCWGESSEDCQSLTRTVCAGGCARCKGPLPTDCCHEQCAAGCTGPKHSDCLACLHFNHSGICELHCPALVTYNTDTFESMPNPEGRYTFGASCVTACPYNYLSTDVGSCTLVCPLHNQEVTAEDGTQRCEKCSKPCARGTHSLPPRPAAVPVPLXMQPGPAHPVLSFLRPSWDLVSAFYSLPLAPLSPTSVPISPVSVGRGPDPDAHVAVDLSRYEG

SEQ ID NO: 265 - protein, 419 aa, Homo sapiens
  VARIANT 371: Xaa= Arg or Ile
MELAALCRWGLLLALLPPGAASTQVCTGTDMKLRLPASPETHLDMLRHLYQGCQVVQGNLELTYLPTNASLSFLQDIQEVQGYVLIAHNQVRQVPLQRLRIVRGTQLFEDNYALAVLDNGDPLNNTTPVTGASPGGLRELQLRSLTEILKGGVLIQRNPQLCYQDTILWKDIFHKNNQLALTLIDTNRSRACHPCSPMCKGSRCWGESSEDCQSLTRTVCAGGCARCKGPLPTDCCHEQCAAGCTGPKHSDCLACLHFNHSGICELHCPALVTYNTDTFESMPNPEGRYTFGASCVTACPYNYLSTDVGSCTLVCPLHNQEVTAEDGTQRCEKCSKPCARGTHSLPPRPAAVPVPLRMQPGPAHPVLSFLXPSWDLVSAFYSLPLAPLSPTSVPISPVSVGRGPDPDAHVAVDLSRYEG

SEQ ID NO: 266 - protein, 79 aa, Homo sapiens
  VARIANT 2: Xaa= Thr or Ser
GXHSLPPRPAAVPVPLRMQPGPAHPVLSFLRPSWDLVSAFYSLPLAPLSPTSVPISPVSVGRGPDPDAHVAVDLSRYEG

SEQ ID NO: 267 - protein, 79 aa, Homo sapiens
  VARIANT 5: Xaa= Leu or Pro
GTHSXPPRPAAVPVPLRMQPGPAHPVLSFLRPSWDLVSAFYSLPLAPLSPTSVPISPVSVGRGPDPDAHVAVDLSRYEG

SEQ ID NO: 268 - protein, 79 aa, Homo sapiens
  VARIANT 6: Xaa= Pro or Leu
GTHSLXPRPAAVPVPLRMQPGPAHPVLSFLRPSWDLVSAFYSLPLAPLSPTSVPISPVSVGRGPDPDAHVAVDLSRYEG

SEQ ID NO: 269 - protein, 79 aa, Homo sapiens
  VARIANT 16: Xaa= Leu or Gln
GTHSLPPRPAAVPVPXRMQPGPAHPVLSFLRPSWDLVSAFYSLPLAPLSPTSVPISPVSVGRGPDPDAHVAVDLSRYEG

SEQ ID NO: 270 - protein, 79 aa, Homo sapiens
  VARIANT 18: Xaa= Met or Leu
GTHSLPPRPAAVPVPLRXQPGPAHPVLSFLRPSWDLVSAFYSLPLAPLSPTSVPISPVSVGRGPDPDAHVAVDLSRYEG

SEQ ID NO: 271 - protein, 79 aa, Homo sapiens
  VARIANT 21: Xaa= Gly, Asp, Ala, or Val
GTHSLPPRPAAVPVPLRMQPXPAHPVLSFLRPSWDLVSAFYSLPLAPLSPTSVPISPVSVGRGPDPDAHVAVDLSRYEG

SEQ ID NO: 272 - protein, 79 aa, Homo sapiens
  VARIANT 36: Xaa= Leu or Ile
GTHSLPPRPAAVPVPLRMQPGPAHPVLSFLRPSWDXVSAFYSLPLAPLSPTSVPISPVSVGRGPDPDAHVAVDLSRYEG

SEQ ID NO: 273 - protein, 79 aa, Homo sapiens
  VARIANT 54: Xaa= Pro or Arg
GTHSLPPRPAAVPVPLRMQPGPAHPVLSFLRPSWDLVSAFYSLPLAPLSPTSVXISPVSVGRGPDPDAHVAVDLSRYEG

SEQ ID NO: 274 - protein, 79 aa, Homo sapiens
  VARIANT 64: Xaa= Pro or Leu
GTHSLPPRPAAVPVPLRMQPGPAHPVLSFLRPSWDLVSAFYSLPLAPLSPTSVPISPVSVGRGXDPDAHVAVDLSRYEG

SEQ ID NO: 275 - protein, 79 aa, Homo sapiens
  VARIANT 73: Xaa= Asp, His or Asn
GTHSLPPRPAAVPVPLRMQPGPAHPVLSFLRPSWDLVSAFYSLPLAPLSPTSVPISPVSVGRGPDPDAHVAVXLSRYEG

SEQ ID NO: 276 - protein, 79 aa, Homo sapiens
  VARIANT 17: Xaa= Arg or Cys
GTHSLPPRPAAVPVPLXMQPGPAHPVLSFLRPSWDLVSAFYSLPLAPLSPTSVPISPVSVGRGPDPDAHVAVDLSRYEG

SEQ ID NO: 277 - protein, 79 aa, Homo sapiens
  VARIANT 31: Xaa= Arg or Ile
GTHSLPPRPAAVPVPLRMQPGPAHPVLSFLXPSWDLVSAFYSLPLAPLSPTSVPISPVSVGRGPDPDAHVAVDLSRYEG

SEQ ID NO: 278 - DNA, 240 bp, Homo sapiens
ggtacccactcactgcccccgaggccagctgcagttcctgtccctctgcgcatgcagcctggcccagcccaccctgtcctatccttcctcagaccctcttgggacctagtctctgccttctactctctacccctggcccccctcagccctacaagtgtccctatatcccctgtcagtgtggggaggggcccggaccctgatgctcatgtggctgttgacctgtcccggtatgaaggctga

SEQ ID NO: 279 - DNA, 240 bp, Homo sapiens
  variation 4: n= T
ggtncccactcactgcccccgaggccagctgcagttcctgtccctctgcgcatgcagcctggcccagcccaccctgtcctatccttcctcagaccctcttgggacctagtctctgccttctactctctacccctggcccccctcagccctacaagtgtccctatatcccctgtcagtgtggggaggggcccggaccctgatgctcatgtggctgttgacctgtcccggtatgaaggctga

SEQ ID NO: 280 - DNA, 240 bp, Homo sapiens
  variation 14: n= C
ggtacccactcacngcccccgaggccagctgcagttcctgtccctctgcgcatgcagcctggcccagcccaccctgtcctatccttcctcagaccctcttgggacctagtctctgccttctactctctacccctggcccccctcagccctacaagtgtccctatatcccctgtcagtgtggggaggggcccggaccctgatgctcatgtggctgttgacctgtcccggtatgaaggctga

SEQ ID NO: 281 - DNA, 240 bp, Homo sapiens
  variation 17: n= T
ggtacccactcactgcncccgaggccagctgcagttcctgtccctctgcgcatgcagcctggcccagcccaccctgtcctatccttcctcagaccctcttgggacctagtctctgccttctactctctacccctggcccccctcagccctacaagtgtccctatatcccctgtcagtgtggggaggggcccggaccctgatgctcatgtggctgttgacctgtcccggtatgaaggctga

SEQ ID NO: 282 - DNA, 240 bp, Homo sapiens
  variation 47: n= A
ggtacccactcactgcccccgaggccagctgcagttcctgtccctcngcgcatgcagcctggcccagcccaccctgtcctatccttcctcagaccctcttgggacctagtctctgccttctactctctacccctggcccccctcagccctacaagtgtccctatatcccctgtcagtgtggggaggggcccggaccctgatgctcatgtggctgttgacctgtcccggtatgaaggctga

SEQ ID NO: 283 - DNA, 240 bp, Homo sapiens
  variation 52: n= C
ggtacccactcactgcccccgaggccagctgcagttcctgtccctctgcgcntgcagcctggcccagcccaccctgtcctatccttcctcagaccctcttgggacctagtctctgccttctactctctacccctggcccccctcagccctacaagtgtccctatatcccctgtcagtgtggggaggggcccggaccctgatgctcatgtggctgttgacctgtcccggtatgaaggctga

SEQ ID NO: 284 - DNA, 240 bp, Homo sapiens
  variation 62: n= C, T, or A
ggtacccactcactgcccccgaggccagctgcagttcctgtccctctgcgcatgcagcctgncccagcccaccctgtcctatccttcctcagaccctcttgggacctagtctctgccttctactctctacccctggcccccctcagccctacaagtgtccctatatcccctgtcagtgtggggaggggcccggaccctgatgctcatgtggctgttgacctgtcccggtatgaaggctga

SEQ ID NO: 285 - DNA, 240 bp, Homo sapiens
  variation 106: n= A
ggtacccactcactgcccccgaggccagctgcagttcctgtccctctgcgcatgcagcctggcccagcccaccctgtcctatccttcctcagaccctcttgggacntagtctctgccttctactctctacccctggcccccctcagccctacaagtgtccctatatcccctgtcagtgtggggaggggcccggaccctgatgctcatgtggctgttgacctgtcccggtatgaaggctga

SEQ ID NO: 286 - DNA, 240 bp, Homo sapiens
  variation 161: n= C
ggtacccactcactgcccccgaggccagctgcagttcctgtccctctgcgcatgcagcctggcccagcccaccctgtcctatccttcctcagaccctcttgggacctagtctctgccttctactctctacccctggcccccctcagccctacaagtgtccntatatcccctgtcagtgtggggaggggcccggaccctgatgctcatgtggctgttgacctgtcccggtatgaaggctga

SEQ ID NO: 287 - DNA, 240 bp, Homo sapiens
  variation 191: n= T
ggtacccactcactgcccccgaggccagctgcagttcctgtccctctgcgcatgcagcctggcccagcccaccctgtcctatccttcctcagaccctcttgggacctagtctctgccttctactctctacccctggcccccctcagccctacaagtgtccctatatcccctgtcagtgtggggaggggccnggaccctgatgctcatgtggctgttgacctgtcccggtatgaaggctga

SEQ ID NO: 288 - DNA, 240 bp, Homo sapiens
  variation 217: n= C or A
ggtacccactcactgcccccgaggccagctgcagttcctgtccctctgcgcatgcagcctggcccagcccaccctgtcctatccttcctcagaccctcttgggacctagtctctgccttctactctctacccctggcccccctcagccctacaagtgtccctatatcccctgtcagtgtggggaggggcccggaccctgatgctcatgtggctgttnacctgtcccggtatgaaggctga

SEQ ID NO: 289 - DNA, 240 bp, Homo sapiens
  variation 17: n= T
  variation 217: n= C or A
ggtacccactcactgcncccgaggccagctgcagttcctgtccctctgcgcatgcagcctggcccagcccaccctgtcctatccttcctcagaccctcttgggacctagtctctgccttctactctctacccctggcccccctcagccctacaagtgtccctatatcccctgtcagtgtggggaggggcccggaccctgatgctcatgtggctgttnacctgtcccggtatgaaggctga

SEQ ID NO: 290 - DNA, 240 bp, Homo sapiens
  variation 49: n= T
ggtacccactcactgcccccgaggccagctgcagttcctgtccctctgngcatgcagcctggcccagcccaccctgtcctatccttcctcagaccctcttgggacctagtctctgccttctactctctacccctggcccccctcagccctacaagtgtccctatatcccctgtcagtgtggggaggggcccggaccctgatgctcatgtggctgttnacctgtcccggtatgaaggctga

SEQ ID NO: 291 - DNA, 240 bp, Homo sapiens
  variation 92: n= T
ggtacccactcactgcccccgaggccagctgcagttcctgtccctctgcgcatgcagcctggcccagcccaccctgtcctatccttcctcanaccctcttgggacctagtctctgccttctactctctacccctggcccccctcagccctacaagtgtccctatatcccctgtcagtgtggggaggggcccggaccctgatgctcatgtggctgttnacctgtcccggtatgaaggctga

SEQ ID NO: 292 - protein, 236 aa, Homo sapiens
MAAGTAVGAWVLVLSLWGAVVGAQNITARIGEPLVLKCKGAPKKPPQRLEWKLNTGRTEAWKVLSPQGGGPWDSVARVLPNGSLFLPAVGIQDEGIFRCQAMNRNGKETKSNYRVRVYQIPGKPEIVDSASELTAGVPNKVVEESRRSRKRPCEQEVGTCVSEGSYPAGTLSWHLDGKPLVPNEKGVSVKEQTRRHPETGLFTLQSELMVTPARGGDPRPTFSCSFSPGLPRHRAL

SEQ ID NO: 293 - protein, 171 aa, Homo sapiens
MAAGTAVGAWVLVLSLWGAVVGAQNITARIGEPLVLKCKGAPKKPPQRLEWKLNTGRTEAWKVLSPQGGGPWDSVARVLPNGSLFLPAVGIQDEGIFRCQAMNRNGKETKSNYRVRVYQIPGKPEIVDSASELTAGVPNKVVEESRRSRKRPCEQEARDMCVRGKLPCRDS

SEQ ID NO: 294 - protein, 147 aa, Homo sapiens
DPRPTFSCSFSPGLPRHRALRTAPIQPRVWEPVPLEEVQLVVEPEGGAVAPGGTVTLTCEVPAQPSPQIHWMKDGVPLPLPPSPVLILPEIGPQDQGTYSCVATHSSHGPQESRAVSISIIEPGEEGPTAGEGFDKVREAEDSPQHM

SEQ ID NO: 295 - protein, 236 aa, Homo sapiens
MAAGTAVGAWVLVLSLWGAVVGAQNITARIGEPLVLKCKGAPKKPPQRLEWKLNTGRTEAWKVLSPQGGGPWDSVARVLPNGSLFLPAVGIQDEGIFRCQAMNRNGKETKSNYRSLRTFTITASDWIFPPSEIPGKPEIVDSASELTAGVPNKVGTCVSEGSYPAGTLSWHLDGKPLVPNEKGVSVKEQTRRHPETGLFTLQSELMVTPARGGDPRPTFSCSFSPGLPRHRALRTA

SEQ ID NO: 296 - protein, 240 aa, Homo sapiens
EGSRMAAGTAVGAWVLVLSLWGAVVGAQNITARIGEPLVLKCKGAPKKPPQRLEWKLNTGRTEAWKVLSPQGGGPWDSVARVLPNGSLFLPAVGIQDEGIFRCQAMNRNGKETKSNYRSLRTFTITASDWIFPPSEIPGKPEIVDSASELTAGVPNKVGTCVSEGSYPAGTLSWHLDGKPLVPNEKGVSVKEQTRRHPETGLFTLQSELMVTPARGGDPRPTFSCSFSPGLPRHRALRTA

SEQ ID NO: 297 - protein, 347 aa, Homo sapiens
MAAGTAVGAWVLVLSLWGAVVGAQNITARIGEPLVLKCKGAPKKPPQRLEWKLNTGRTEAWKVLSPQGGGPWDSVARVLPNGSLFLPAVGIQDEGIFRCQAMNRNGKETKSNYRVRVYQIPGKPEIVDSASELTAGVPNKVGTCVSEGSYPAGTLSWHLDGKPLVPNEKGVSVKEQTRRHPETGLFTLQSELMVTPARGGDPRPTFSCSFSPGLPRHRALRTAPIQPRVWEPVPLEEVQLVVEPEGGAVAPGGTVTLTCEVPAQPSPQIHWMKDGVPLPLPPSPVLILPEIGPQDQGTYSCVATHSSHGPQESRAVSISIIEPGEEGPTAGEGFDKVREAEDSPQHM

SEQ ID NO: 298 - protein, 342 aa, Homo sapiens
MAAGTAVGAWVLVLSLWGAVVGAQNITARIGEPLVLKCKGAPKKPPQRLEWKLGGGPWDSVARVLPNGSLFLPAVGIQDEGIFRCQAMNRNGKETKSNYRVRVYQIPGKPEIVDSASELTAGVPNKVGTCVSEGSYPAGTLSWHLDGKPLVPNEKGVSVKEQTRRHPETGLFTLQSELMVTPARGGDPRPTFSCSFSPGLPRHRALRTAPIQPRVWEPVPLEEVQLVVEPEGGAVAPGGTVTLTCEVPAQPSPQIHWMKDVSDLERGAGRTRRGGANCRLCGRIRAGNSSPGPGDPGRPGDSRPAHWGHLVAKAATPRRGEEGPRKPGGRGGACRTESVGGT

SEQ ID NO: 299 - protein, 363 aa, Homo sapiens
MAAGTAVGAWVLVLSLWGAVVGAQNITARIGEPLVLKCKGAPKKPPQRLEWKLNTGRTEAWKVLSPQGGGPWDSVARVLPNGSLFLPAVGIQDEGIFRCQAMNRNGKETKSNYRVRVYQIPGKPEIVDSASELTAGVPNKVGTCVSEGSYPAGTLSWHLDGKPLVPNEKGVSVKEQTRRHPETGLFTLQSELMVTPARGGDPRPTFSCSFSPGLPRHRALRTAPIQPRVWEPVPLEEVQLVVEPEGGAVAPGGTVTLTCEVPAQPSPQIHWMKDGVPLPLPPSPVLILPEIGPQDQGTYSCVATHSSHGPQESRAVSISIIGSVGGSGLGTLALALGILGGLGTAALLIGVILWQRRQRRGEE

SEQ ID NO: 300 - protein, 388 aa, Homo sapiens
MAAGTAVGAWVLVLSLWGAVVGAQNITARIGEPLVLKCKGAPKKPPQRLEWKLNTGRTEAWKVLSPQGGGPWDSVARVLPNGSLFLPAVGIQDEGIFRCQAMNRNGKETKSNYRVRVYQIPGKPEIVDSASELTAGVPNKVGTCVSEGSYPAGTLSWHLDGKPLVPNEKGVSVKEQTRRHPETGLFTLQSELMVTPARGGDPRPTFSCSFSPGLPRHRALRTAPIQPRVWEPVPLEEVQLVVEPEGGAVAPGGTVTLTCEVPAQPSPQIHWMKDGVPLPLPPSPVLILPEIGPQDQGTYSCVATHSSHGPQESRAVSISIIEPGEEGPTAGSVGGSGLGTLALALGILGGLGTAALLIGVILWQRRQRRAELNQSEEPEAGESSTGGP

SEQ ID NO: 301 - protein, 347 aa, Homo sapiens; identical to SEQ ID NO: 297

SEQ ID NO: 302 - protein, 335 aa, Homo sapiens
MAAGTAVGAWVLVLSLWGAVVGAQNITARIGEPLVLKCKGAPKKPPQRLEWKLNTGRTEAWKVLSPQGGGPWDSVARVLPNGSLFLPAVGIQDEGIFRCQAMNRNGKETKSNYRVRVYQIPGKPEIVDSASELTAGVPNKVGTCVSEGSYPAGTLSWHLDGKPLTRRHPETGLFTLQSELMVTPARGGDPRPTFSCSFSPGLPRHRALRTAPIQPRVWEPVPLEEVQLVVEPEGGAVAPGGTVTLTCEVPAQPSPQIHWMKDGVPLPLPPSPVLILPEIGPQDQGTYSCVATHSSHGPQESRAVSISIIEPGEEGPTAGEGFDKVREAEDSPQHM

SEQ ID NO: 303 - protein, 303 aa, Homo sapiens
MNRNGKETKSNYRVRVYQIPGKPEIVDSASELTAGVPNKVGTCVSEGSYPAGTLSWHLDGKPLVPNEKGVSVKEQTRRHPETGLFTLQSELMVTPARGGDPRPTFSCSFSPGLPRHRALRTAPIQPRVWEPVPLEEVQLVVEPEGGAVAPGGTVTLTCEVPAQPSPQIHWMKDGVPLPLPPSPVLILPEIGPQDQGTYSCVATHSSHGPQESRAVSISIIEPGEEGPTAGSVGGSGLGTLALALGILGGLGTAALLIGVILWQRRQRRGEERKAPENQEEEEERAELNQSEEPEAGESSTGGP

SEQ ID NO: 304 - protein, 149 aa, Homo sapiens
MNRNGKETKSNYRVRVYQIPGKPEIVDSASELTAGVPNKVGTCVSEGSYPAGTLSWHLDGKPLVPNEKGVSVKEQTRRHPETGLFTLQSELMVTPARGGDPRPTFSCSFSPGLPRHRALRTAPIQPRVWGEHRWGGPQAHVSTFWKSDP

SEQ ID NO: 305 - protein, 366 aa, Homo sapiens
MAAGTAVGAWVLVLSLWGAVVGAQNITARIGEPLVLKCKGAPKKPPQRLEWKLNTGRTEAWKVLSPQGGGPWDSVARVLPNGSLFLPAVGIQDEGIFRCQAMNRNGKETKSNYRVRVYQIPGKPEIVDSASELTAGVPNKVGTCVSEGSYPAGTLSWHLDGKPLVPNEKGVSVKEQTRRHPETGLFTLQSELMVTPARGGDPRPTFSCSFSPGLPRHRALRTAPIQPRVWEPVPLEEVQLVVEPEGGAVAPGGTVTLTCEVPAQPSPQIHWMKDGVPLPLPPSPVLILPEIGPQDQGTYSCVATHSSHGPQESRAVSISIIEPGEEGPTAGSVGGSGLGTLALALGILGGLGTAALLIGVILWQRR

SEQ ID NO: 306 - protein, 405 aa, Artificial Sequence
  EGFR.a
MRPSGTAGAALLALLAALCPASRALEEKKVCQGTSNKLTQLGTFEDHFLSLQRMFNNCEVVLGNLEITYVQRNYDLSFLKTIQEVAGYVLIALNTVERIPLENLQIIRGNMYYENSYALAVLSNYDANKTGLKELPMRNLQEILHGAVRFSNNPALCNVESIQWRDIVSSDFLSNMSMDFQNHLGSCQKCDPSCPNGSCWGAGEENCQKLTKIICAQQCSGRCRGKSPSDCCHNQCAAGCTGPRESDCLVCRKFRDEATCKDTCPPLMLYNPTTYQMDVNPEGKYSFGATCVKKCPRNYVVTDHGSCVRACGADSYEMEEDGVRKCKKCEGPCRKVCNGIGIGEFKDSLSINATNIKHFKNCTSISGDLHILPVAFRGDSFTHTPPLDPQELDILKTVKEITGLS

SEQ ID NO: 307 - protein, 419 aa, Artificial Sequence
  ERBB2.c BUILD 31
MELAALCRWGLLLALLPPGAASTQVCTGTDMKLRLPASPETHLDMLRHLYQGCQVVQGNLELTYLPTNASLSFLQDIQEVQGYVLIAHNQVRQVPLQRLRIVRGTQLFEDNYALAVLDNGDPLNNTTPVTGASPGGLRELQLRSLTEILKGGVLIQRNPQLCYQDTILWKDIFHKNNQLALTLIDTNRSRACHPCSPMCKGSRCWGESSEDCQSLTRTVCAGGCARCKGPLPTDCCHEQCAAGCTGPKHSDCLACLHFNHSGICELHCPALVTYNTDTFESMPNPEGRYTFGASCVTACPYNYLSTDVGSCTLVCPLHNQEVTAEDGTQRCEKCSKPCARGTHSLPPRPAAVPVPLRMQPGPAHPVLSFLRPSWDLVSAFYSLPLAPLSPTSVPISPVSVGRGPDPDAHVAVDLSRYEG

SEQ ID NO: 308 - protein, 331 aa, Artificial Sequence
  ERBB3.d BUILD 31
MRANDALQVLGLLFSLARGSEVGNSQAVCPGTLNGLSVTGDAENQYQTLYKLYERCEVVMGNLEIVLTGHNADLSFLQWIREVTGYVLVAMNEFSTLPLPNLRVVRGTQVYDGKFAIFVMLNYNTNSSHALRQLRLTQLTEILSGGVYIEKNDKLCHMDTIDWRDIVRDRDAEIVVKDNGRSCPPCHEVCKGRCWGPGSEDCQTLTKTICAPQCNGHCFGPNPNQCCHDECAGGCSGPQDTDCFACRHFNDSGACVPRCPQPLVYNKLTFQLEPNPHTKYQYGGVCVASCPHNFVVDQTSCVRACPPDKMEVDKNGLKMCEPCGGLCPKAF

SEQ ID NO: 309 - protein, 366 aa, Artificial Sequence
  FGFR2.b BUILD 31
MVSWGRFICLVVVTMATLSLARPSFSLVEDTTLEPEEPPTKYQISQPEVYVAAPGESLEVRCLLKDAAVISWTKDGVHLGPNNRTVLIGEYLQIKGATPRDSGLYACTASRTVDSETWYFMVNVTDAISSGDDEDDTDGAEDFVSENSNNKRAPYWTNTEKMEKRLHAVPAANTVKFRCPAGGNPMPTMRWLKNGKEFKQEHRIGGYKVRNQHWSLIMESVVPSDKGNYTCVVENEYGSINHTYHLDVVERSPHRPILQAGLPANASTVVGGDVEFVCKVYSDAQPHIQWIKHVEKNGSKYGPDGLPYLKVLKHSGINSSNAEVLALFNVTEADAGEYICKVSNYIGQANQSAWLTVLPKQQGRRC

SEQ ID NO: 310 - protein, 218 aa, Artificial Sequence
  PDGFRA.c  BUILD34
MGTSHPAFLVLGCLLTGLSLILCQLSLPSILPNENEKVVQLNSSFSLRCFGESEVSWQYPMSEEESSDVEIRNEENNSGLFVTVLEVSSASAAHTGLYTCYYNHTQTEENELEGRHIYIYVPDPDVAFVPLGMTDYLVIVEDDDSAIIPCRTTDPETPVTLHNSEGVVPASYDSRQGFNGTFTVGPYICEATVKGKKFQTIPFNVYALKGTCIISFLL

SEQ ID NO: 311 - protein, 838 aa, Artificial Sequence
  TIE.IFP
MVWRVPPFLLPILFLASHVGAAVDLTLLANLRLTDPQRFFLTCVSGEAGAGRGSDAWGPPLLLEKDDRIVRTPPGPPLRLARNGSHQVTLRGFSKPSDLVGVFSCVGGAGARRTRVIYVHNSPGAHLLPDKVTHTVNKGDTAVLSARVHKEKQTDVIWKSNGSYFYTLDWHEAQDGRFLLQLPNVQPPSSGIYSATYLEASPLGSAFFRLIVRGCGAGRWGPGCTKECPGCLHGGVCHDHDGECVCPPGFTGTRCEQACREGRFGQSCQEQCPGISGCRGLTFCLPDPYGCSCGSGWRGSQCQEACAPGHFGADCRLQCQCQNGGTCDRFSGCVCPSGWHGVHCEKSDRIPQILNMASELEFNLETMPRINCAAAGNPFPVRGSIELRKPDGTVLLSTKAIVEPEKTTAEFEVPRLVLADSGFWECRVSTSGGQDSRRFKVNVKVPPVPLAAPRLLTKQSRQLVVSPLVSFSGDGPISTVRLHYRPQDSTMDWSTIVVDPSENVTLMNLRPKTGYSVRVQLSRPGEGGEGAWGPPTLMTTDCPEPLLQPWLEGWHVEGTDRLRVSWSLPLVPGPLVGDGFLLRLWDGTRGQERRENVSSPQARTALLTGLTPGTHYQLDVQLYHCTLLGPASPPAHVLLPPSGPPAPRHLHAQALSDSEIQLTWKHPEALPGPISKYVVEVQVAGGAGDPLWIDVDRPEETSTIIRGLNASTRYLFRMRASIQGLGDWSNTVEESTLGNGLQAEGPVQESRAAEEGLDQQLILAVVGSVSATCLTILAALLTLVCIRRSCLHRRRTFTYQSGSGEETILQFSSGTLTLTRRPKLQPEPLSYPVLEWED

SEQ ID NO: 312 - protein, 632 aa, Artificial Sequence
  TIE.IFP
MVWRVPPFLLPILFLASHVGAAVDLTLLANLRLTDPQRFFLTCVSGEAGAGRGSDAWGPPLLLEKDDRIVRTPPGPPLRLARNGSHQVTLRGFSKPSDLVGVFSCVGGAGARRTRVIYVHNSPGAHLLPDKVTHTVNKGDTAVLSARVHKEKQTDVIWKSNGSYFYTLDWHEAQDGRFLLQLPNVQPPSSGIYSATYLEASPLGSAFFRLIVRGCGAGRWGPGCTKECPGCLHGGVCHDHDGECVCPPGFTGTRCEQACREGRFGQSCQEQCPGISGCRGLTFCLPDPYGCSCGSGWRGSQCQEACAPGHFGADCRLQCQCQNGGTCDRFSGCVCPSGWHGVHCEKSDRIPQILNMASELEFNLETMPRINCAAAGNPFPVRGSIELRKPDGTVLLSTKAIVEPEKTTAEFEVPRLVLADSGFWECRVSTSGGQDSRRFKVNVKVPPVPLAAPRLLTKQSRQLVVSPLVSFSGDGPISTVRLHYRPQDSTMDWSTIVVDPSENVTLMNLRPKTGYSVRVQLSRPGEGGEGAWGPPTLMTTDCPEPLLQPWLEGWHVEGTDRLRVSWSLPLVPGPLVGDGFLLRLWDGTRGQERRENVSSPQARTALLTGLTPGTHYQLDVQLYHCTLLGPAS

SEQ ID NO: 313 - protein, 533 aa, Artificial Sequence
  TIE.IFP
MVWRVPPFLLPILFLASHVGAAVDLTLLANLRLTDPQRFFLTCVSGEAGAGRGSDAWGPPLLLEKDDRIVRTPPGPPLRLARNGSHQVTLRGFSKPSDLVGVFSCVGGAGARRTRVIYVHNSPGAHLLPDKVTHTVNKGDTAVLSARVHKEKQTDVIWKSNGSYFYTLDWHEAQDGRFLLQLPNVQPPSSGIYSATYLEASPLGSAFFRLIVRGCGAGRWGPGCTKECPGCLHGGVCHDHDGECVCPPGFTGTRCEQACREGRFGQSCQEQCPGISGCRGLTFCLPDPYGCSCGSGWRGSQCQEACAPGHFGADCRLQCQCQNGGTCDRFSGCVCPSGWHGVHCEKSDRIPQILNMASELEFNLETMPRINCAAAGNPFPVRGSIELRKPDGTVLLSTKAIVEPEKTTAEFEVPRLVLADSGFWECRVSTSGGQDSRRFKVNVKVPPVPLAAPRLLTKQSRQLVVSPLVSFSGDGPISTVRLHYRPQDSTMDWSTIVVDPSENVTLMNLRPKTGYSVRVQLSRPGEGGEGAWG

SEQ ID NO: 314 - protein, 428 aa, Artificial Sequence
  TIE.IFP
MVWRVPPFLLPILFLASHVGAAVDLTLLANLRLTDPQRFFLTCVSGEAGAGRGSDAWGPPLLLEKDDRIVRTPPGPPLRLARNGSHQVTLRGFSKPSDLVGVFSCVGGAGARRTRVIYVHNSPGAHLLPDKVTHTVNKGDTAVLSARVHKEKQTDVIWKSNGSYFYTLDWHEAQDGRFLLQLPNVQPPSSGIYSATYLEASPLGSAFFRLIVRGCGAGRWGPGCTKECPGCLHGGVCHDHDGECVCPPGFTGTRCEQACREGRFGQSCQEQCPGISGCRGLTFCLPDPYGCSCGSGWRGSQCQEACAPGHFGADCRLQCQCQNGGTCDRFSGCVCPSGWHGVHCEKSDRIPQILNMASELEFNLETMPRINCAAAGNPFPVRGSIELRKPDGTVLLSTKAIVEPEKTTAEFEVPRLVLADSGFWECRV

SEQ ID NO: 315 - protein, 344 aa, Artificial Sequence
  TIE.IFP
MVWRVPPFLLPILFLASHVGAAVDLTLLANLRLTDPQRFFLTCVSGEAGAGRGSDAWGPPLLLEKDDRIVRTPPGPPLRLARNGSHQVTLRGFSKPSDLVGVFSCVGGAGARRTRVIYVHNSPGAHLLPDKVTHTVNKGDTAVLSARVHKEKQTDVIWKSNGSYFYTLDWHEAQDGRFLLQLPNVQPPSSGIYSATYLEASPLGSAFFRLIVRGCGAGRWGPGCTKECPGCLHGGVCHDHDGECVCPPGFTGTRCEQACREGRFGQSCQEQCPGISGCRGLTFCLPDPYGCSCGSGWRGSQCQEACAPGHFGADCRLQCQCQNGGTCDRFSGCVCPSGWHGVHC

SEQ ID NO: 316 - protein, 255 aa, Artificial Sequence
  TIE.IFP
MVWRVPPFLLPILFLASHVGAAVDLTLLANLRLTDPQRFFLTCVSGEAGAGRGSDAWGPPLLLEKDDRIVRTPPGPPLRLARNGSHQVTLRGFSKPSDLVGVFSCVGGAGARRTRVIYVHNSPGAHLLPDKVTHTVNKGDTAVLSARVHKEKQTDVIWKSNGSYFYTLDWHEAQDGRFLLQLPNVQPPSSGIYSATYLEASPLGSAFFRLIVRGCGAGRWGPGCTKECPGCLHGGVCHDHDGECVCPPGFTGTRC

SEQ ID NO: 317 - protein, 197 aa, Artificial Sequence
  TIE.IFP
MVWRVPPFLLPILFLASHVGAAVDLTLLANLRLTDPQRFFLTCVSGEAGAGRGSDAWGPPLLLEKDDRIVRTPPGPPLRLARNGSHQVTLRGFSKPSDLVGVFSCVGGAGARRTRVIYVHNSPGAHLLPDKVTHTVNKGDTAVLSARVHKEKQTDVIWKSNGSYFYTLDWHEAQDGRFLLQLPNVQPPSSGIYSATY

SEQ ID NO: 318 - protein, 687 aa, Artificial Sequence
  FLT1.d BUILD 31
MVSYWDTGVLLCALLSCLLLTGSSSGSKLKDPELSLKGTQHIMQAGQTLHLQCRGEAAHKWSLPEMVSKESERLSITKSACGRNGKQFCSTLTLNTAQANHTGFYSCKYLAVPTSKKKETESAIYIFISDTGRPFVEMYSEIPEIIHMTEGRELVIPCRVTSPNITVTLKKFPLDTLIPDGKRIIWDSRKGFIISNATYKEIGLLTCEATVNGHLYKTNYLTHRQTNTIIDVQISTPRPVKLLRGHTLVLNCTATTPLNTRVQMTWSYPDEKNKRASVRRRIDQSNSHANIFYSVLTIDKMQNKDKGLYTCRVRSGPSFKSVNTSVHIYDKAFITVKHRKQQVLETVAGKRSYRLSMKVKAFPSPEVVWLKDGLPATEKSARYLTRGYSLIIKDVTEEDAGNYTILLSIKQSNVFKNLTATLIVNVKPQIYEKAVSSFPDPALYPLGSRQILTCTAYGIPQPTIKWFWHPCNHNHSEARCDFCSNNEESFILDADSNMGNRIESITQRMAIIEGKNKMASTLVVADSRISGIYICIASNKVGTVGRNISFYITDVPNGFHVNLEKMPTEGEDLKLSCTVNKFLYRDVTWILLRTVNNRTMHYSISKQKMAITKEHSITLNLTIMNVSLQDSGTYACRARNVYTGEEILQKKEITIRGEHCNKKAVFSRISKFKSTRNDCTTQSNVKH

SEQ ID NO: 319 - protein, 4 aa, Artificial Sequence
  linker sequence
AAPA

SEQ ID NO: 320 - DNA, 27 bp, Artificial Sequence
  synthetic with NCOI linkers
ccatgggcggcggcggctctgccatgg

SEQ ID NO: 321 - DNA, 42 bp, Artificial Sequence
  linker sequence
ccatgggcggcggcggctctggcggcggcggctctgccatgg

SEQ ID NO: 322 - DNA, 75 bp, Artificial Sequence
  linker sequence
ccatggcctcgtcgtcgtcgggctcgtcgtcgtcgggctcgtcgtcgtcgggctcgtcgtcgtcgggcgccatgg

SEQ ID NO: 323 - DNA, 45 bp, Artificial Sequence
  linker sequence
ccatggcctcgtcgtcgtcgggctcgtcgtcgtcgggcgccatgg

SEQ ID NO: 324 - protein, 8 aa, Artificial Sequence
  linker sequence
AAPAAAPA

SEQ ID NO: 325 - DNA, 4557 bp, Homo Sapiens
caagactgtcagagtggggaacccctcccattaaagatccgggcaggactggggacaggttggaagtgtgatgggtgggggggtgggaggcatgggccgggggcagttctctcctcacttgtaaacttgtgtagtttcacagaaaaaaaacaaaatgcagttttaaataaagaaatttcttttttccctgggtttagttgagaatttttttcaaaaaacatgagaaaccccagaaaaaaaatgattttctttcacgaagttccaaacaggtttctctcctgttccccagccttgccttcatgatgcaggcccaattgcacccttgcagacaacagtctggcctgaaccctattgatgcaactttgcgcaatcaagatggggctccagtgggtcaccaggcagccctgatggactgatggaataaataggatcgggggctctgagggaatgagaccctagagggtacactccccatcccccagggaagtgactgtacccagaggctggtagtacccaggggtggggtgataattatttctctagtacctgaaggactcttgtcccaaaggcatgaattcctagcattccctgtgacaagacgactgaaagatgggggctggagagagggtgcaggccccacctagggcggaggccacagcagggagaggggcagacagagccaggaccctggaaggaagcaggatggcagccggaacagcagttggagcctgggtgctggtcctcagtctgtggggtgagccactccctcaaccccactgaccctccctgcagaaagcactttaaccccacaccccagtcgtcctagaacttttcccagaacccgaggaagtgcctttcaaggtccctcacccaccctgtccaaattttgttagccctcattcccttcctacccctctaccatggtgctatctcccaggggcagtagtaggtgctcaaaacatcacagcccggattggcgagccactggtgctgaagtgtaagggggcccccaagaaaccaccccagcggctggaatggaaactggtaagcggggctcctgttgcagcctcccaacttccagggagaccagcaatgatttggatccccgtcactctgcctcacagtcctttcccaaaggccttgcactgtttaggccctgcttctctgcttctagaacacaggccggacagaagcttggaaggtcctgtctccccagggaggaggcccctgggacagtgtggctcgtgtccttcccaacggctccctcttccttccggctgtcgggatccaggatgaggggattttccggtgccaggcaatgaacaggaatggaaaggagaccaagtccaactaccgagtccgtgtctaccgtaagaattccagggtcttctccaaggcctccctcttacctaagaaaaagccttcaaccccagccttggcccatgagggcctctgacttccactggcctcatttccacacacagagtttgagaaccttcacaattacagcctctgactggatttttcctccttcagagattcctgggaagccagaaattgtagattctgcctctgaactcacggctggtgttcccaataaggtagtggaagaaagcaggagaagtagaaaacggccctgtgaacaggaggcgagtgtgtgtgggtgtgggtgtgtggcatctctcattttcaaaggattctgaggtcaccactctttccccaggtggggacatgtgtgtcagagggaagctaccctgcagggactcttagctggcacttggatgggaagcccctggtgcctaatgagaagggtgagtcctaaggtgccccccaagctgccttctccctgatctcactcccacacccaccctgggataatttgtcttatcctcccatcataggagtatctgtgaaggaacagaccaggagacaccctgagacagggctcttcacactgcagtcggagctaatggtgaccccagcccggggaggagatccccgtcccaccttctcctgtagcttcagcccaggccttccccgacaccgggccttgcgcacagcccccatccagccccgtgtctggggtgagcataggtggggagggccccaagctcacgtgagcacgttctggaagtctgacccttagggaaagagggagtcaagcccatggccactgggatcactcacaagtgtaactctccacctcaaaacccttccaactcccagagcctgtgcctctggaggaggtccaattggtggtggagccagaaggtggagcagtagctcctggtggaaccgtaaccctgacctgtgaagtccctgcccagccctctcctcaaatccactggatgaaggatgtgagtgacctggagagaggggctgggaggtagggtgaaccataactatcaacagggagggcagagggctaacgagggaaaggcaggctaggagctgaggaggaagagagggtatctgaagatatggagacaaaaagacaagggttttgaaatagtctcctctccccttcccccaccagggtgtgcccttgccccttccccccagccctgtgctgatcctccctgagatagggcctcaggaccagggaacctacagctgtgtggccacccattccagccacgggccccaggaaagccgtgctgtcagcatcagcatcatcggtgagacctctccccaagccctacagaccctgggactagggtgcaggacagcacaggctctaatttcctgccccattctggccttatccctaacagccaccccacctctccctccatgcacccacacccaagcctcccctgccccacccaaattctgccaagagagcagccaagcctctcccttcttccctctgagctaaaaaaaggaacagacggctgggcgcggtggctcacgcctgtaatcccaacactttgggaggctgaggcgggcagatcacctgaggtagggagttcgagaccagcctgaccaacatggagaaaccccatttctactaaaaatacaaaattagccaggcatggtggcacatgcctgtaatcccagctacctgggaggccagctacttgagaggctgaggcaggagaattgcttgaacccaggaggcatagattgcgatgagccaagatcgcaccattgcatgccagcctgggcaacaaaagtgaaactccatctcaaaaaaaaaaagaaagggaaagactccactggggctcccactaaataaccctctctcaacccgaagtcttcctttctgactggatccaactttgtcttccagaaccaggcgaggaggggccaactgcaggtgaggggtttgataaagtcagggaagcagaagatagcccccaacacatgtgactggggggatggtcaacaagaaaggaatggtgagtggtggtggctgtgctctcaattttccctgtctccgtacaggctctgtgggaggatcagggctgggaactctagccctggccctggggatcctgggaggcctggggacagccgccctgctcattggggtcatcttgtggcaaaggcggcaacgccgaggagaggagaggtgagtggagaaagccagacccctcagacctagggcttccaggcagcaagcgaagaggggtcggggggtggaacgacaacgtgccgcattccccccaatctttctcctcaggaaggccccagaaaaccaggaggaagaggaggagcgtgcagaactgaatcagtcggaggaacctgaggcaggcgagagtagtactggagggccttgaggggcccacagacagatcccatccatcagctcccttttctttttcccttgaactgttctggcctcagaccaactctctcctgtataatctctctcctgtataaccccaccttgccaagctttcttctacaaccagagccccccacaatgatgattaaacacctgacacatcttgctcttgtgtgtctgtgtgtgtgtatgagacacaacctcacccctatacccttgagggccctgaaggaaagggactcacccccatacttcaccatactataccaaacatctactcaagttggggagaagatgcttctgtcgggggtgggggcgaacttgggaagagatcccatcaatatatttcaccttttttattgaatttgtattaaaggaggtagtgagggggcggaagcacttaagagtcagaatccatattagactctggggagtgaaaaattaaattaaatcagtaagatggggagtgggggaagagtcagagggaactttgcccacctttgaagatcaaatcaagaaatcagggaaagcaaagacttaggagaggagaaagacattctctcaatccatcctccttccccagggcagagaattaaacaacgttactgagtgagcctctgagcagaaggctctcccatctatgcacagacttcactcctcctccccaggccttcctggacaatgtccagggctggccttagccaacagaaatagaggggtcaagggggtccaggagtacggaagggtcagcagggaccctcaatact

SEQ ID NO: 326 - DNA, 105 bp, Homo sapiens
atggatgcaatgaagagagggctctgctgtgtgctgctgctgtgtggagcagtcttcgtttcgcccagccaggaaatccatgcccgattcagaagaggagccaga

SEQ ID NO: 327 - protein, 35 aa, Homo sapiens
MDAMKRGLCCVLLLCGAVFVSPSQEIHARFRRGAR

SEQ ID NO: 328 - DNA, 2653 bp, Homo sapiens
atggccctgtccactgagcatcctcccgccacacagaaacccgcccagccggggccaccgaccccaccccctgcctggaaacttaaggaggccggagctgtggggagctcagagctgagatcctacaggagtccagggctggagagaaaacctctgcgaggaaagggaaggagcaagccgtgaatttaagggacgctgtgaagcaatcatggatgcaatgaagagagggctctgctgtgtgctgctgctgtgtggagcagtcttcgtttcgcccagccaggaaatccatgcccgattcagaagaggagccagatcttaccaagtgatctgcagagatgaaaaaacgcagatgatataccagcaacatcagtcatggctgcgccctgtgctcagaagcaaccgggtggaatattgctggtgcaacagtggcagggcacagtgccactcagtgcctgtcaaaagttgcagcgagccaaggtgtttcaacgggggcacctgccagcaggccctgtacttctcagatttcgtgtgccagtgccccgaaggatttgctgggaagtgctgtgaaatagataccagggccacgtgctacgaggaccagggcatcagctacaggggcacgtggagcacagcggagagtggcgccgagtgcaccaactggaacagcagcgcgttggcccagaagccctacagcgggcggaggccagacgccatcaggctgggcctggggaaccacaactactgcagaaacccagatcgagactcaaagccctggtgctacgtctttaaggcggggaagtacagctcagagttctgcagcacccctgcctgctctgagggaaacagtgactgctactttgggaatgggtcagcctaccgtggcacgcacagcctcaccgagtcgggtgcctcctgcctcccgtggaattccatgatcctgataggcaaggtttacacagcacagaaccccagtgcccaggcactgggcctgggcaaacataattactgccggaatcctgatggggatgccaagccctggtgccacgtgctgaagaaccgcaggctgacgtgggagtactgtgatgtgccctcctgctccacctgcggcctgagacagtacagccagcctcagtttcgcatcaaaggagggctcttcgccgacatcgcctcccacccctggcaggctgccatctttgccaagcacaggaggtcgcccggagagcggttcctgtgcgggggcatactcatcagctcctgctggattctctctgccgcccactgcttccaggagaggtttccgccccaccacctgacggtgatcttgggcagaacataccgggtggtccctggcgaggaggagcagaaatttgaagtcgaaaaatacattgtccataaggaattcgatgatgacacttacgacaatgacattgcgctgctgcagctgaaatcggattcgtcccgctgtgcccaggagagcagcgtggtccgcactgtgtgccttcccccggcggacctgcagctgccggactggacggagtgtgagctctccggctacggcaagcatgaggccttgtctcctttctattcggagcggctgaaggaggctcatgtcagactgtacccatccagccgctgcacatcacaacatttacttaacagaacagtcaccgacaacatgctgtgtgctggagacactcggagcggcgggccccaggcaaacttgcacgacgcctgccagggcgattcgggaggccccctggtgtgtctgaacgatggccgcatgactttggtgggcatcatcagctggggcctgggctgtggacagaaggatgtcccgggtgtgtacaccaaggttaccaactacctagactggattcgtgacaacatgcgaccgtgaccaggaacacccgactcctcaaaagcaaatgagatcccgcctcttcttcttcagaagacactgcaaaggcgcagtgcttctctacagacttctccagacccaccacaccgcagaagcgggacgagaccctacaggagagggaagagtgcattttcccagatacttcccattttggaagttttcaggacttggtctgatttcaggatactctgtcagatgggaagacatgaatgcacactagcctctccaggaatgcctcctccctgggcagaaagtggccatgccaccctgttttcagctaaagcccaacctcctgacctgtcaccgtgagcagctttggaaacaggaccacaaaaatgaaagcatgtctcaatagtaaaagataacaagatctttcaggaaagacggattgcattagaaatagacagtatatttatagtcacaagagcccagcagggcctcaaagttggggcaggctggctggcccgtcatgttcctcaaaagcacccttgacgtcaagtctccttcccctttccccactccctggctctcagaaggtattccttttgtgtacagtgtgtaaagtgtaaatcctttttctttataaactttagagtagcatgagagaattgtatcatttgaacaactaggcttcagcatatttatagcaatccatgttagtttttactttctgttgccacaaccctgttttatactgtacttaataaattcagatatatttttcacagtttttcc

SEQ ID NO: 329 - protein, 562 aa, Homo sapiens
MDAMKRGLCCVLLLCGAVFVSPSQEIHARFRRGARSYQVICRDEKTQMIYQQHQSWLRPVLRSNRVEYCWCNSGRAQCHSVPVKSCSEPRCFNGGTCQQALYFSDFVCQCPEGFAGKCCEIDTRATCYEDQGISYRGTWSTAESGAECTNWNSSALAQKPYSGRRPDAIRLGLGNHNYCRNPDRDSKPWCYVFKAGKYSSEFCSTPACSEGNSDCYFGNGSAYRGTHSLTESGASCLPWNSMILIGKVYTAQNPSAQALGLGKHNYCRNPDGDAKPWCHVLKNRRLTWEYCDVPSCSTCGLRQYSQPQFRIKGGLFADIASHPWQAAIFAKHRRSPGERFLCGGILISSCWILSAAHCFQERFPPHHLTVILGRTYRVVPGEEEQKFEVEKYIVHKEFDDDTYDNDIALLQLKSDSSRCAQESSVVRTVCLPPADLQLPDWTECELSGYGKHEALSPFYSERLKEAHVRLYPSSRCTSQHLLNRTVTDNMLCAGDTRSGGPQANLHDACQGDSGGPLVCLNDGRMTLVGIISWGLGCGQKDVPGVYTKVTNYLDWIRDNMRP

SEQ ID NO: 330 - DNA, 105 bp, Homo sapiens
  allele 101: n= C or A
atggatgcaatgaagagagggctctgctgtgtgctgctgctgtgtggagcagtcttcgtttcgcccagccaggaaatccatgcccgattcagaagaggagncaga

SEQ ID NO: 331 - protein, 35 aa, Homo sapiens
  VARIANT 34: Xaa= A or D
MDAMKRGLCCVLLLCGAVFVSPSQEIHARFRRGXR

SEQ ID NO: 332 - protein, 32 aa, Mus musculus
MKRELLCVLLLCGLAFPLPDQGIHGRFRRGAR

SEQ ID NO: 333 - protein, 32 aa, Rattus norvegicus
MKGELLCVLLLCGVAFTLPDQGIHRRFRRGAR

SEQ ID NO: 334 - protein, 36 aa, Bos taurus
MMSAMKTEFLCVLLLCGAVFTSPSQETYRRLRRGAR

SEQ ID NO: 335 - protein, 35 aa, Pongo pygmaeus
MNAMKRGLCCVLLLCGAVFALPSQEIHARVRRGAR

SEQ ID NO: 336 - protein, 35 aa, Sus scrofa
MYALKRELWCVLLLCGAICTSPSQETHRRLRRGVR

SEQ ID NO: 337 - protein, 38 aa, Gallus gallus
MWKTLRMKGKLLSLLLLVGVIKTAQCQGTHMRYKRGAR

SEQ ID NO: 338 - protein, 36 aa, Desmodus rotundus
MVNTMKTKLLCVLLLCGAVFSLPRQETYRQLARGSR

SEQ ID NO: 339 - protein, 36 aa, Oryctolagus cuniculus
MWNPGVRELLCVLLLCGAACARPSQEAPARVRRGAR

SEQ ID NO: 340 - DNA, 870 bp, Artificial Sequence
  tPA-myc-RAGE
atggatgcaatgaagagagggctctgctgtgtgctgctgctgtgtggagcagtcttcgtttcgcccagccaggaaatccatgcccgattcagaagaggagccagagaacaaaaactcatctcagaagaggatctgctcgagcaaaacatcacagcccggattggcgagccactggtgctgaagtgtaagggggcccccaagaaaccaccccagcggctggaatggaaactgaacacaggccggacagaagcttggaaggtcctgtctccccagggaggaggcccctgggacagtgtggctcgtgtccttcccaacggctccctcttccttccggctgtcgggatccaggatgaggggattttccggtgccaggcaatgaacaggaatggaaaggagaccaagtccaactaccgagtccgtgtctaccagatccctgggaagccagaaattgtagattctgcctctgaactcacggctggtgttcccaataaggtagtggaagaaagcaggagaagtagaaaacggccctgtgaacaggaggtggggacatgtgtgtcagagggaagctaccctgcagggactcttagctggcacttggatgggaagcccctggtgcctaatgagaagggagtatctgtgaaggaacagaccaggagacaccctgagacagggctcttcacactgcagtcggagctaatggtgaccccagcccggggaggagatccccgtcccaccttctcctgtagcttcagcccaggccttccccgacaccgggccttgcgcacagcccccatccagccccgtgtctggggtgagcataggtggggagggccccaagctcacgtgagcacgttctggaagtctgaccct

SEQ ID NO: 341 - protein, 290 aa, Artificial Sequence
  tPA-myc-RAGE
MDAMKRGLCCVLLLCGAVFVSPSQEIHARFRRGAREQKLISEEDLLEQNITARIGEPLVLKCKGAPKKPPQRLEWKLNTGRTEAWKVLSPQGGGPWDSVARVLPNGSLFLPAVGIQDEGIFRCQAMNRNGKETKSNYRVRVYQIPGKPEIVDSASELTAGVPNKVVEESRRSRKRPCEQEVGTCVSEGSYPAGTLSWHLDGKPLVPNEKGVSVKEQTRRHPETGLFTLQSELMVTPARGGDPRPTFSCSFSPGLPRHRALRTAPIQPRVWGEHRWGGPQAHVSTFWKSDP

SEQ ID NO: 342 - protein, 79 aa, Homo sapiens
  VARIANT 6: Xaa= Pro or Leu
  VARIANT 73: Xaa= Asp, His or Asn
  Intron 8 variant
GTHSLXPRPAAVPVPLRMQPGPAHPVLSFLRPSWDLVSAFYSLPLAPLSPTSVPISPVSVGRGPDPDAHVAVXLSRYEG

SEQ ID NO: 343 - protein, 419 aa, Homo sapiens
  VARIANT 346: Xaa = Pro or Leu
  VARIANT 413: Xaa = Asp, His, or Asn
  Herstatin variant
MELAALCRWGLLLALLPPGAASTQVCTGTDMKLRLPASPETHLDMLRHLYQGCQVVQGNLELTYLPTNASLSFLQDIQEVQGYVLIAHNQVRQVPLQRLRIVRGTQLFEDNYALAVLDNGDPLNNTTPVTGASPGGLRELQLRSLTEILKGGVLIQRNPQLCYQDTILWKDIFHKNNQLALTLIDTNRSRACHPCSPMCKGSRCWGESSEDCQSLTRTVCAGGCARCKGPLPTDCCHEQCAAGCTGPKHSDCLACLHFNHSGICELHCPALVTYNTDTFESMPNPEGRYTFGASCVTACPYNYLSTDVGSCTLVCPLHNQEVTAEDGTQRCEKCSKPCARGTHSLXPRPAAVPVPLRMQPGPAHPVLSFLRPSWDLVSAFYSLPLAPLSPTSVPISPVSVGRGPDPDAHVAVXLSRYEG

SEQ ID NO: 344 - protein, 467 aa, Homo sapiens
  HGF SR023A02
MWVTKLLPALLLQHVLLHLLLLPIAIPYAEGQRKRRNTIHEFKKSAKTTLIKIDPALKIKTKKVNTADQCANRCTRNKGLPLTCKAFVFDKARKQCLWFPFNSMSSGVKKEFGHEFDLYENKDYIRNCIIGKGRSYKGTVSITKSGIKCQPWSSMIPHEHSYRGKDLQENYCRNPRGEEGGPWCFTSNPEVRYEVCDIPQCSEVECMTCNGESYRGLMDHTESGKICQRWDHQTPHRHKFLPERYPDKGFDDNYCRNPDGQPRPWCYTLDPHTRWEYCAIKTCADNTMNDTDVPLETTECIQGQGEGYRGTVNTIWNGISCQRWDSQYPHEHDMTPENFKCKDLRENYCRNPDGSESPWCFTTDPNIRVGYCSQIPNCDMSHGQDCYRGNGKNYMGNLSQTRSGLTCSMWDKNMEDLHRHIFWEPDASKLNENYCRNPDDDAHGPWCYTGNPLIPWDYCPISRCKYS

SEQ ID NO: 345 - protein, 467 aa, Homo sapiens
  HGF SR023A02
MWVTKLLPALLLQHVLLHLLLLPIAIPYAEGQRKRRNTIHEFKKSAKTTLIKIDPALKIKTKKVNTADQCANRCTRNKGLPFTCKAFVFDKARKQCLWFPFNSMSSGVKKEFGHEFDLYENKDYIRNCIIGKGRSYKGTVSITKSGIKCQPWSSMIPHEHSYRGKDLQENYCRNPRGEEGGPWCFTSNPEVRYEVCDIPQCSEVECMTCNGESYRGLMDHTESGKICQRWDHQTPHRHKFLPERYPDKGFDDNYCRNPDGQPRPWCYTLDPHTRWEYCAIKTCADNTMNDTDVPLETTECIQGQGEGYRGTVNTIWNGIPCQRWDSQYPHEHDMTPENFKCKDLRENYCRNPDGSESPWCFTTDPNIRVGYCSQIPNCDMSHGQDCYRGNGKNYMGNLSQTRSGLTCSMWDKNMEDLHRHIFWEPDASKLNENYCRNPDDDAHGPWCYTGNPLIPWDYCPISRCKYS

SEQ ID NO: 346 - protein, 472 aa, Homo sapiens
  HGF SR023A08
MWVTKLLPALLLQHVLLHLLLLPIAIPYAEGQRKRRNTIHEFKKSAKTTLIKIDPALKIKTKKVNTADQCANRCTRNKGLPFTCKAFVFDKARKQCLWFPFNSMSSGVKKEFGHEFDLYENKDYIRNCIIGKGRSYKGTVSITKSGIKCQPWSSMIPHEHSFLPSSYRGKDLQENYCRNPRGEEGGPWCFTSNPEVRYEVCDIPQCSEVECMTCNGESYRGLMDHTESGKICQRWDHQTPHRHKFLPERYPDKGFDDNYCRNPDGQPRPWCYTLDPHTRWEYCAIKTCADNTMNDTDVPLETTKCIQGQGEGYRGTVNTIWNGIPCQRWDSQYPHEHDMTPENFKCKDLRENYCRNPDGSESPWCFTTDPNIRVGYCSQIPNCDMSHGQDCYRGNGKNYMGNLSQTRSGLTCSMWDKNMEDLHRHIFWEPDASKLNENYCRNPDDDAHGPWCYTGNPLIPWDYCPISRCKYS

SEQ ID NO: 347 - protein, 472 aa, Homo sapiens
  HGF SR023A08
MWVTKLLPALLLQHVLLHLLLLPIAIPYAEGQRKRRNTIHEFKKSAKTTLIKIDPALKIKTKKVNTADQCANRCTRNKGLPFTCKAFVFDKARKQCLWFPFNSMSSGVKKEFGHEFDLYENKDYIRNCIIGKGRSYKGTVSITKSGIKCQPWSSMIPHEHSFLPSSYRGKDLQENYCRNPRGEEGGPWCFTSNPEVRYEVCDIPQCSEVECMTCNGESYRGLMDHTESGKICQRWDHQTPHRHKFLPERYPDKGFDDNYCRNPDGQPRPWCYTLDPHTRWEYCAIKTCADNTMNDTDVPLETTECIQGQGEGYRGTVNTIWNGIPCQRWDSQYPHEHDMTPENFKCKDLRENYCRNPDGSESPWCFTTDPNIRVGYCSQIPNCDMSHGQDCYRGNGKNYMGNLSQTRSGLTCSMWDKNMEDLHRHIFWEPDASKLNENYCRNPDDDAHGPWCYTGNPLIPWDYCPISRCKYS

SEQ ID NO: 348 - protein, 514 aa, Homo sapiens
  HGF SR023E09
MWVTKLLPALLLQHVLLHLLLLPIAIPYAEGQRKRRNTIHEFKKSAKTTLIKIDPALKIKTKKVNTADQCANRCTRNKGLPFTCKAFVFDKARKQCLWFPFNSMSSGVKKEFGHEFDLYENKDYIRNCIIGKGRSYKGTVSITKSGIKCQPWSSMIPHEHSFLPSSYRGKDLQENYCRNPRGEEGGPWCFTSNPEVRYEVCDIPQCSEVECMTCNGESYRGLMDHTESGKICQRWDHQTPHRHKFLPERYPDKGFDDNYCRNPDGQPRPWCYTLDPHTRWEYCAIKTCADNTMNDTDVPLETTECIQGQGEGYRGTVNTIWNGIPCQRWDSQYPHEHDMTPENFKCKDLRENYCRNPDGSESPWCFTTDPNIRVGYCSQIPNCDMSHGQDCYRGNGKNYMGNLSQTRSGLTCSMWDKNMEDLHRHIFWEPDASKLNENYCRNPDDDAHGPWCYTGNPLIPWDYCPISRCEGDTTPTIVNLDHPVISCAKTKQLRVVNGIPTRTNIGWMVSLRYR

SEQ ID NO: 349 - DNA, 21 bp, Artificial Sequence
  Primer tPA_F
ctctgcgaggaaagggaagga

SEQ ID NO: 350 - DNA, 21 bp, Artificial Sequence
  Primer tPA_R
cgtgcccctgtagctgatgcc

SEQ ID NO: 351 - DNA, 3851 bp, Artificial Sequence
  pDrive cloning vector
gcgcccaatacgcaaaccgcctctccccgcgcgttggccgattcattaatgcagctggcacgacaggtttcccgactggaaagcgggcagtgagcgcaacgcaattaatgtgagttagctcactcattaggcaccccaggctttacactttatgcttccggctcgtatgttgtgtggaattgtgagcggataacaatttcacacaggaaacagctatgaccatgattacgccaagctctaatacgactcactatagggaaagctcggtaccacgcatgctgcagacgcgttacgtatcggatccagaattcgtgatatctgaattcgtcgacaagcttctcgagcctaggctagctctagaccacacgtgtgggggcccgagctcgcggccgctgtattctatagtgtcacctaaatggccgcacaattcactggccgtcgttttacaacgtcgtgactgggaaaaccctggcgttacccaacttaatcgccttgcagcacatccccctttcgccagctggcgtaatagcgaagaggcccgcaccgatcgcccttcccaacagttgcgcagcctgaatggcgaatggaaattgtaagcgttaatattttgttaaaattcgcgttaaatttttgttaaatcagctcattttttaaccaataggccgaaatcggcaaaatcccttataaatcaaaagaatagaccgagatagggttgagtgttgttccagtttggaacaagagtccactattaaagaacgtggactccaacgtcaaagggcgaaaaaccgtctatcagggcgatggcccactacgtgaaccatcaccctaatcaagttttttggggtcgaggtgccgtaaagcactaaatcggaaccctaaagggagcccccgatttagagcttgacggggaaagccggcgaacgtggcgagaaaggaagggaagaaagcgaaaggagcgggcgctagggcgctggcaagtgtagcggtcacgctgcgcgtaaccaccacacccgccgcgcttaatgcgccgctacagggcgcgtcaggtggcacttttcggggaaatgtgcgcggaacccctatttgtttatttttctaaatacattcaaatatgtatccgctcatgagacaataaccctgataaatgcttcaataatattgaaaaaggaagagtatgagtattcaacatttccgtgtcgcccttattcccttttttgcggcattttgccttcctgtttttgctcacccagaaacgctggtgaaagtaaaagatgctgaagatcagttgggtgcacgagtgggttacatcgaactggatctcaacagcggtaagatccttgagagttttcgccccgaagaacgttttccaatgatgagcacttttaaagttctgctatgtggcgcggtattatcccgtattgacgccgggcaagagcaactcggtcgccgcatacactattctcagaatgacttggttgagtactcaccagtcacagaaaagcatcttacggatggcatgacagtaagagaattatgcagtgctgccataaccatgagtgataacactgcggccaacttacttctgacaacgatcggaggaccgaaggagctaaccgcttttttgcacaacatgggggatcatgtaactcgccttgatcgttgggaaccggagctgaatgaagccataccaaacgacgagcgtgacaccacgatgcctgtagcaatggcaacaacgttgcgcaaactattaactggcgaactacttactctagcttcccggcaacaattaatagactggatggaggcggataaagttgcaggaccacttctgcgctcggcccttccggctggctggtttattgctgataaatctggagccggtgagcgtgggtctcgcggtatcattgcagcactggggccagatggtaagccctcccgtatcgtagttatctacacgacggggagtcaggcaactatggatgaacgaaatagacagatcgctgagataggtgcctcactgattaagcattggtaactgtcagaccaagtttactcatatatactttagattgatttaaaacttcatttttaatttaaaaggatctaggtgaagatcctttttgataatctcatgaacaataaaactgtctgcttacataaacagtaatacaaggggtgttatgagccatattcaacgggaaacgtcttgctctaggccgcgattaaattccaacatggatgctgatttatatgggtataaatgggctcgcgataatgtcgggcaatcaggtgcgacaatctatcgattgtatgggaagcccgatgcgccagagttgtttctgaaacatggcaaaggtagcgttgccaatgatgttacagatgagatggtcagactaaactggctgacggaatttatgcctcttccgaccatcaagcattttatccgtactcctgatgatgcatggttactcaccactgcgatccccgggaaaacagcattccaggtattagaagaatatcctgattcaggtgaaaatattgttgatgcgctggcagtgttcctgcgccggttgcattcgattcctgtttgtaattgtccttttaacagcgatcgcgtatttcgtctcgctcaggcgcaatcacgaatgaataacggtttggttgatgcgagtgattttgatgacgagcgtaatggctggcctgttgaacaagtctggaaagaaatgcataaacttttgccattctcaccggattcagtcgtcactcatggtgatttctcacttgataaccttatttttgacgaggggaaattaataggttgtattgatgttggacgagtcggaatcgcagaccgataccaggatcttgccatcctatggaactgcctcggtgagttttctccttcattacagaaacggctttttcaaaaatatggtattgataatcctgatatgaataaattgcagtttcatttgatgctcgatgagtttttctaagaattaattcatgaccaaaatcccttaacgtgagttttcgttccactgagcgtcagaccccgtagaaaagatcaaaggatcttcttgagatcctttttttctgcgcgtaatctgctgcttgcaaacaaaaaaaccaccgctaccagcggtggtttgtttgccggatcaagagctaccaactctttttccgaaggtaactggcttcagcagagcgcagataccaaatactgtccttctagtgtagccgtagttaggccaccacttcaagaactctgtagcaccgcctacatacctcgctctgctaatcctgttaccagtggctgctgccagtggcgataagtcgtgtcttaccgggttggactcaagacgatagttaccggataaggcgcagcggtcgggctgaacggggggttcgtgcacacagcccagcttggagcgaacgacctacaccgaactgagatacctacagcgtgagctatgagaaagcgccacgcttcccgaagggagaaaggcggacaggtatccggtaagcggcagggtcggaacaggagagcgcacgagggagcttccagggggaaacgcctggtatctttatagtcctgtcgggtttcgccacctctgacttgagcgtcgatttttgtgatgctcgtcaggggggcggagcctatggaaaaacgccagcaacgcggcctttttacggttcctggccttttgctggccttttgctcacatgttctttcctgcgttatcccctgattctgtggataaccgtattaccgcctttgagtgagctgataccgctcgccgcagccgaacgaccgagcgcagcgagtcagtgagcgaggaagcggaaga

SEQ ID NO: 352 - DNA, 35 bp, Artificial Sequence
  Primer tPApre/pro_F1
attagctagccaccatggatgcaatgaagagaggg

SEQ ID NO: 353 - DNA, 58 bp, Artificial Sequence
  Primer tPApre/pro_R1
attactcgagcagatcctcttctgagatgagtttttgttctggctcctcttcgaatcg

SEQ ID NO: 354 - DNA, 4006 bp, Artificial Sequence
  pCI expression vector
tcaatattggccattagccatattattcattggttatatagcataaatcaatattggctattggccattgcatacgttgtatctatatcataatatgtacatttatattggctcatgtccaatatgaccgccatgttggcattgattattgactagttattaatagtaatcaattacggggtcattagttcatagcccatatatggagttccgcgttacataacttacggtaaatggcccgcctggctgaccgcccaacgacccccgcccattgacgtcaataatgacgtatgttcccatagtaacgccaatagggactttccattgacgtcaatgggtggagtatttacggtaaactgcccacttggcagtacatcaagtgtatcatatgccaagtccgccccctattgacgtcaatgacggtaaatggcccgcctggcattatgcccagtacatgaccttacgggactttcctacttggcagtacatctacgtattagtcatcgctattaccatggtgatgcggttttggcagtacaccaatgggcgtggatagcggtttgactcacggggatttccaagtctccaccccattgacgtcaatgggagtttgttttggcaccaaaatcaacgggactttccaaaatgtcgtaataaccccgccccgttgacgcaaatgggcggtaggcgtgtacggtgggaggtctatataagcagagctcgtttagtgaaccgtcagatcactagaagctttattgcggtagtttatcacagttaaattgctaacgcagtcagtgcttctgacacaacagtctcgaacttaagctgcagaagttggtcgtgaggcactgggcaggtaagtatcaaggttacaagacaggtttaaggagaccaatagaaactgggcttgtcgagacagagaagactcttgcgtttctgataggcacctattggtcttactgacatccactttgcctttctctccacaggtgtccactcccagttcaattacagctcttaaggctagagtacttaatacgactcactataggctagcctcgagaattcacgcgtggtacctctagagtcgacccgggcggccgcttcgagcagacatgataagatacattgatgagtttggacaaaccacaactagaatgcagtgaaaaaaatgctttatttgtgaaatttgtgatgctattgctttatttgtaaccattataagctgcaataaacaagttaacaacaacaattgcattcattttatgtttcaggttcagggggagatgtgggaggttttttaaagcaagtaaaacctctacaaatgtggtaaaatcgataaggatccgggctggcgtaatagcgaagaggcccgcaccgatcgcccttcccaacagttgcgcagcctgaatggcgaatggacgcgccctgtagcggcgcattaagcgcggcgggtgtggtggttacgcgcagcgtgaccgctacacttgccagcgccctagcgcccgctcctttcgctttcttcccttcctttctcgccacgttcgccggctttccccgtcaagctctaaatcgggggctccctttagggttccgatttagtgctttacggcacctcgaccccaaaaaacttgattagggtgatggttcacgtagtgggccatcgccctgatagacggtttttcgccctttgacgttggagtccacgttctttaatagtggactcttgttccaaactggaacaacactcaaccctatctcggtctattcttttgatttataagggattttgccgatttcggcctattggttaaaaaatgagctgatttaacaaaaatttaacgcgaattttaacaaaatattaacgcttacaatttcctgatgcggtattttctccttacgcatctgtgcggtatttcacaccgcatatggtgcactctcagtacaatctgctctgatgccgcatagttaagccagccccgacacccgccaacacccgctgacgcgccctgacgggcttgtctgctcccggcatccgcttacagacaagctgtgaccgtctccgggagctgcatgtgtcagaggttttcaccgtcatcaccgaaacgcgcgagacgaaagggcctcgtgatacgcctatttttataggttaatgtcatgataataatggtttcttagacgtcaggtggcacttttcggggaaatgtgcgcggaacccctatttgtttatttttctaaatacattcaaatatgtatccgctcatgagacaataaccctgataaatgcttcaataatattgaaaaaggaagagtatgagtattcaacatttccgtgtcgcccttattcccttttttgcggcattttgccttcctgtttttgctcacccagaaacgctggtgaaagtaaaagatgctgaagatcagttgggtgcacgagtgggttacatcgaactggatctcaacagcggtaagatccttgagagttttcgccccgaagaacgttttccaatgatgagcacttttaaagttctgctatgtggcgcggtattatcccgtattgacgccgggcaagagcaactcggtcgccgcatacactattctcagaatgacttggttgagtactcaccagtcacagaaaagcatcttacggatggcatgacagtaagagaattatgcagtgctgccataaccatgagtgataacactgcggccaacttacttctgacaacgatcggaggaccgaaggagctaaccgcttttttgcacaacatgggggatcatgtaactcgccttgatcgttgggaaccggagctgaatgaagccataccaaacgacgagcgtgacaccacgatgcctgtagcaatggcaacaacgttgcgcaaactattaactggcgaactacttactctagcttcccggcaacaattaatagactggatggaggcggataaagttgcaggaccacttctgcgctcggcccttccggctggctggtttattgctgataaatctggagccggtgagcgtgggtctcgcggtatcattgcagcactggggccagatggtaagccctcccgtatcgtagttatctacacgacggggagtcaggcaactatggatgaacgaaatagacagatcgctgagataggtgcctcactgattaagcattggtaactgtcagaccaagtttactcatatatactttagattgatttaaaacttcatttttaatttaaaaggatctaggtgaagatcctttttgataatctcatgaccaaaatcccttaacgtgagttttcgttccactgagcgtcagaccccgtagaaaagatcaaaggatcttcttgagatcctttttttctgcgcgtaatctgctgcttgcaaacaaaaaaaccaccgctaccagcggtggtttgtttgccggatcaagagctaccaactctttttccgaaggtaactggcttcagcagagcgcagataccaaatactgttcttctagtgtagccgtagttaggccaccacttcaagaactctgtagcaccgcctacatacctcgctctgctaatcctgttaccagtggctgctgccagtggcgataagtcgtgtcttaccgggttggactcaagacgatagttaccggataaggcgcagcggtcgggctgaacggggggttcgtgcacacagcccagcttggagcgaacgacctacaccgaactgagatacctacagcgtgagctatgagaaagcgccacgcttcccgaagggagaaaggcggacaggtatccggtaagcggcagggtcggaacaggagagcgcacgagggagcttccagggggaaacgcctggtatctttatagtcctgtcgggtttcgccacctctgacttgagcgtcgatttttgtgatgctcgtcaggggggcggagcctatggaaaaacgccagcaacgcggcctttttacggttcctggccttttgctggccttttgctcacatggctcgacagatct

SEQ ID NO: 355 - DNA, 29 bp, Artificial Sequence
  Primer RAGEIFP_F
aattctcgagcaaaacatcacagcccgga

SEQ ID NO: 356 - DNA, 30 bp, Artificial Sequence
  Primer RAGEIFP_R
aattgaattcctaagggtcagacttccaga

SEQ ID NO: 357 - protein, 44 aa, Artificial Sequence
  R subunit
SHIQIPPGLTELLQGYTVEVLRQQPPDLVEFAVEYFTRLREARA

SEQ ID NO: 358 - protein, 17 aa, Artificial Sequence
  AD
QIEYLAKQIVDNAIQQA

SEQ ID NO: 359 - protein, 45 aa, Artificial Sequence
  Modified R Subunit
CSHIQIPPGLTELLQGYTVEVLRQQPPDLVEFAVEYFTRLREARA

SEQ ID NO: 360 - protein, 21 aa, Artificial Sequence
  Modified AD
CGQIEYLAKQIVDNAIQQAGC

SEQ ID NO: 361 - protein, 231 aa, Homo Sapiens
PKSCDKTHTCPPCPAPELLGGPSVFLFPPKPKDTLMISRTPEVTCVVVDVSHEDPEVKFNWYVDGVEVHNAKTKPREEQYNSTYRVVSVLTVLHQDWLNGKEYKCKVSNKALPAPIEKTISKAKGQPREPQVYTLPPSREEMTKNQVSLTCLVKGFYPSDIAVEWESNGQPENNYKTTPPVLDSDGSFFLYSKLTVDKSRWQQGNVFSCSVMHEALHNHYTQKSLSLSPGK

SEQ ID NO: 362 - protein, 245 aa, Homo sapiens
  hIgG1Fc
VPLASTGLGYRYVEPRSCDKTHTCPPCPAPELLGGPSVFLFPPKPKDTLMISRTPEVTCVVVDVSHEDPEVKFNWYVDGVEVHNAKTKPREEQYNSTYRVVSVLTVLHQDWLNGKDYKCKVSNKALPAPMQKTISKAKGQPREPQVYTLPPSRDELTKNQVSLTCLVKGFYPRHIAVEWESNGQPENNYKTTPPVLDSDGSFFLYSKLTVDKSRWQQGNVFSCSVMHEALHNHYTQKSLSLSPGK

SEQ ID NO: 363 - protein, 245 aa, Homo Sapiens
  mutein hIgG1Fc
VPLASTGLGYRYVEPRSCDKTHTCPPCPAPEAEGAPSVFLFPPKPKDTLMISRTPEVTCVVVDVSHEDPEVKFNWYVDGVEVHNAKTKPREEQYNSTYRVVSVLTVLHQDWLNGKDYKCKVSNKALPAPMQKTISKAKGQPREPQVYTLPPSRDELTKNQVSLTCLVKGFYPRHIAVEWESNGQPENNYKTTPPVLDSDGSFFLYSKLTVDKSRWQQGNVFSCSVMHEALHNHYTQKSLSLSPGK

SEQ ID NO: 364 - protein, 39 aa, Homo Sapiens
  c-jun leucine zipper
RIARLEEKVKTLKAQNSELASTANMLREQVAQLKQKVMN

SEQ ID NO: 365 - protein, 39 aa, Homo sapines
  c-fos leucine zipper
LTDTLQAETDQLEDEKSALQTEIANLLKEKEKLEFILAA

SEQ ID NO: 366 - protein, 43 aa, Artificial Sequence
  modified c-jun leucine zipper
CGGRIARLEEKVKTLKAQNSELASTANMLREQVAQLKQKVMNY

SEQ ID NO: 367 - protein, 43 aa, Artificial Sequence
  modified c-fos leucine zipper
CGGLTDTLQAETDQLEDEKSALQTEIANLLKEKEKLEFILAAY

1. An isolated Receptor for Advanced Glycation Endproducts (RAGE) isoform polypeptide, wherein:
the RAGE isoform is an intron fusion protein, wherein the intron portion is encoded by a sequence of nucleotides that includes all or a portion of an intron selected from among introns 2, 3, 5 and 8 of a cognate RAGE gene.

2. The isolated RAGE isoform polypeptide of claim 1, wherein the sequence of the cognate RAGE gene is set forth in SEQ ID NO:325, or is an allelic or species variant thereof.

3. The RAGE isoform polypeptide of claim 1, wherein the isoform comprises a sequence of amino acids set forth in any one of SEQ ID NOS: 10-12, or is an allelic or species variant thereof.

4. An isolated Receptor for Advanced Glycation Endproducts (RAGE) isoform polypeptide, comprising:
a deletion and/or insertion of one or more amino acids of the first C-type Ig-like domain of RAGE;
a deletion and/or insertion of one or more amino acids of the second C-type Ig-like domain of RAGE;
a deletion and/or insertion of one or more amino acids of the transmembrane domain of RAGE, wherein:
the membrane localization of the RAGE isoform is reduced or abolished compared to RAGE; and
the RAGE isoform is an intron fusion protein.

5. The RAGE isoform polypeptide of claim 4, wherein the isoform has a sequence of amino acids set forth in any one of SEQ ID NOS: 10, 11, 13, or 14, or is an allelic or species variant thereof.

6. An isolated Receptor for Advanced Glycation Endproducts (RAGE) isoform polypeptide that comprises a sequence of amino acids selected from among:
a) a sequence that comprises at least 70% of the amino acid sequence set forth in SEQ ID NO: 10 and that has at least 70% sequence identity with a sequence of amino acids set forth in SEQ ID NO: 10;
b) a sequence that comprises at least 75% of the amino acid sequence set forth in SEQ ID NO: 11 and that has at least 75% sequence identity with a sequence of amino acids set forth in SEQ ID NO: 11;
c) a sequence that comprises at least 86% of the amino acid sequence set forth in SEQ ID NO: 12 and that has at least 86% sequence identity with a sequence of amino acids set forth in SEQ ID NO: 12;
d) a sequence that comprises at least 90% of the amino acid sequence set forth in SEQ ID NO:13 and that has at least 90% sequence identity with a sequence of amino acids set forth in SEQ ID NO: 13; and
e) a sequence that comprises at least 93% of the amino acid sequence set forth in SEQ ID NO: 14 and that has at least 93% sequence identity with a sequence of amino acids set forth in SEQ ID NO: 14, wherein:
sequence identity is compared along the full length of each SEQ ID to the full length sequence of the RAGE isoform.

7. The RAGE isoform polypeptide of claim 6, wherein sequence identity is compared with a mature isoform that lacks a signal sequence.

8. The RAGE isoform polypeptide of claim 6, wherein sequence identity is compared with a precursor form that includes a signal sequence.

9. The RAGE isoform polypeptide of claim 6, that is encoded by a nucleic acid molecule that comprises at least one codon from an intron, wherein the intron is from a gene encoding RAGE.

10. A RAGE isoform polypeptide of any of claim 1, claim 4 or claim 6, but lacking the signal peptide.

11. The RAGE isoform polypeptide of any of claims 1, claim 4 or claim 6, wherein the isoform comprises a signal peptide.

12. The RAGE isoform polypeptide of claim 3 or claim 5, wherein the allelic variant comprises variations that correspond to one or more of the allelic variations denoted in SEQ ID NO: 4.

13. The RAGE isoform polypeptide of claim 1, claim 4 or claim 6, wherein the RAGE isoform contains the same number of amino acids as any of SEQ ID NOS: 10-14, or the same number but lacking the signal sequence in each.

14. A RAGE isoform polypeptide of claim 1, claim 4, or claim 6 that is encoded by a sequence of nucleotides set forth in SEQ ID NOS: 5-9 or an allelic or species variant thereof.

15. The RAGE isoform polypeptide of claim 14, wherein the allelic variant comprises variations that correspond to one or more nucleotides of the allelic variations denoted in SEQ ID NO: 3.

16. The RAGE isoform polypeptide of any of claims 1, 4 and 6, wherein the isoform modulates a function or activity of a RAGE receptor.

17. The RAGE isoform polypeptide of claim 16, wherein the activity of a RAGE modulated by the polypeptide is selected from among one or more of: ligand binding, competition with RAGE for ligand binding, ligand endocytosis, regulation of gene expression, signal transduction, interaction with a signal transduction molecule, membrane association and membrane localization.

18. A RAGE isoform polypeptide that has at least 70%, 75%, 80%, 85%, 90%, 95%, 96%, 97%, 98%, 99% or more sequence identity to a polypeptide of claim 1 or claim 4.

19. A pharmaceutical composition, comprising a RAGE isoform of any of claims 1, 4, and 6.

20. The composition of claim 19, comprising an amount of the isoform effective for modulating an activity of a cell surface receptor.

21. The composition of claim 19, wherein the isoform modulates a function or activity of a RAGE.

22. The composition of claim 19, wherein the activity modulated by the polypeptide is one or more of: ligand binding, competition with RAGE for ligand binding, ligand endocytosis, regulation of gene expression, signal transduction, interaction with a signal transduction molecule, membrane association and membrane localization.

23. The composition of claim 20, wherein modulation is an inhibition of activity.

24. The composition of claim 19, wherein the isoform of the composition complexes with a RAGE.

25. A nucleic acid molecule encoding a RAGE isoform of any of claims 1, 4, and 6.

26. A nucleic acid molecule of claim 25, comprising an intron and an exon, wherein:
the intron contains a stop codon;
the nucleic acid molecule encodes an open reading frame that spans an exon intron junction; and
the open reading frame terminates at the stop codon in the intron.

27. The nucleic acid molecule of claim 26, wherein the intron encodes one or more amino acids of the encoded RAGE isoform.

28. The nucleic acid molecule of claim 26, wherein the stop codon is the first codon in the intron.

29. An isolated nucleic acid molecule of claim 25, comprising a sequence of nucleotides set forth in any one of SEQ ID NOS: 5-9 or an allelic or species variant thereof.

30. A vector, comprising the nucleic acid molecule of claim 25.

31. The vector of claim 30 that is a mammalian vector.

32. The vector of claim 31 that is a viral vector.

33. The vector of claim 30 that is episomal or that integrates into the chromosome of a cell into which it is introduced.

34. A cell, comprising the vector of claim 30

35. A pharmaceutical composition, comprising a vector of claim 30.

36. A method of treating a disease or condition comprising, administering a pharmaceutical composition of claim 19 to a subject.

37. The method of claim 36, wherein the disease or condition is selected from among diabetes, diabetes-related conditions, cancers, inflammatory diseases, angiogenesis-related conditions, cell proliferation-related conditions, immune disorders, kidney disease, ocular disease, endometriosis, periodontal disease and neurodegenerative diseases.

38. The method of claim 37, wherein the disease or condition is selected from among rheumatoid arthritis, osteoarthritic arthritis, multiple sclerosis, Alzheimer's disease, Creutzfeldt-Jakob disease, Huntington's disease, and posterior intraocular inflammation, uveitic disorders, ocular surface inflammatory disorders, macular degeneration, neovascular disease, proliferative vitreoretinopathy, atherosclerosis, type I diabetes, multiple sclerosis and chronic kidney disease.

39. The method of claim 37, wherein the diabetes-associated condition is selected from periodontal disease, autoimmune disease, vascular disease, tubulointerstitial disease, atherosclerosis and vascular disease associated with wound healing.

40. The method of claim 37, wherein the cancer is selected from the group consisting of carcinoma, lymphoma, blastoma, sarcoma, leukemia, lymphoid malignancies, squamous cell cancer, lung cancer including small-cell lung cancer, non-small cell lung cancer, adenocarcinoma of the lung and squamous carcinoma of the lung, cancer of the peritoneum, hepatocellular cancer, gastrointestinal cancer, pancreatic cancer, glioblastoma, cervical cancer, ovarian cancer, liver cancer, bladder cancer, hepatoma, breast cancer, colon cancer, rectal cancer, colorectal cancer, endometrial/uterine carcinoma, salivary gland carcinoma, renal cancer, prostate cancer, vulval cancer, thyroid cancer, hepatic carcinoma, anal carcinoma, penile carcinoma, and head and neck cancer.

41. The method of claim 36, wherein the pharmaceutical composition contains a polypeptide that inhibits angiogenesis, cell proliferation, cell migration, tumor cell growth or tumor cell metastasis.

42. The method of claim 36, wherein the disease is an angiogenesis-related disease.

43. The method of claim 36, wherein the disease is selected from among inflammatory and immune disorders.

44. The method of claim 43, wherein the disease is selected from among
diabetic retinopathies and/or neuropathies and other inflammatory vascular complications of diabetes, autoimmune diseases, including autoimmune diabetes, atherosclerosis, Crohn's disease, diabetic kidney disease, cystic fibrosis, endometriosis, diabetes-induced vascular injury, inflammatory bowel disease, Alzheimers disease and other neurodegenerative diseases.

45. A method of inhibiting tumor invasion or metastasis of a tumor, comprising administering a composition of claim 19 to a subject.

46. A conjugate, comprising a RAGE isoform or an active fragment thereof.

47. The conjugate of claim 46, comprising a RAGE isoform or fragment thereof linked to a multimerization domain.

48. The conjugate of claim 47, wherein the multimerization domain is selected from among an Fc region, a leucine zipper, an amino acid sequence comprising a protuberance complementary to an amino acid sequence comprising a hole, a hydrophobic domain, a hydrophilic domain, an amino acid sequence comprising a free thiol moiety which reacts to form an intermolecular disulfide bond with a multimerization domain of an additional amino acid sequence, and a protein interaction domain selected from among an R subunit of a PKA and an anchoring domain (AD).

49. A conjugate, comprising a RAGE isoform of any of claims 1, 4, and 6.

50. A multimeric compound, comprising one or more conjugates of claim 47 and one or more other cell surface receptor isoforms or active fragments thereof linked to a multimerization domain, whereby the resulting compound modulates the activity of a RAGE and/or a CSR.

51. The multimeric compound of claim 50 that is a homodimer or a heterodimer or a trimer.

52. The multimeric compound of claim 50, comprising a RAGE isoform or a domain thereof or a ligand binding portion thereof and a cell surface receptor isoform or a domain thereof or a ligand binding portion or ligand isoform.

53. A chimeric polypeptide, comprising all or at least one domain of a RAGE isoform or an active fragment thereof and all of or at least one domain of a different RAGE isoform or of another cell surface receptor isoform or of a ligand isoform or portion of an isoform that possesses an activity.

54. The chimeric polypeptide of claim 53, wherein the cell surface receptor isoform is an intron fusion protein.

55. The chimeric polypeptide of claim 54, that comprises all of or at least one domain of a RAGE isoform and an intron-encoded portion of a cell surface receptor isoform.

56. A pharmaceutical composition, comprising a polypeptide or conjugate or multimeric compound of any of claims 46, 50 and 53.

57. A method of treating a disease or condition comprising, administering a pharmaceutical composition of claim 56, wherein the disease or condition is mediated by or involves a CSR in its etiology.

58. A combination comprising:
one or more RAGE isoform(s) and one or more other cell surface receptor (CSR) isoforms and/or a therapeutic drug.

59. The combination of claim 58, wherein the isoforms and/or drugs are in separate compositions or in a single composition.

60. A method of treatment, comprising administering the components of the combination of claim 58, wherein each component is administered separately, simultaneously, intermittently, in a single composition or combinations thereof.

61. The method of claim 36, wherein:
the composition comprises a nucleic acid molecule or a vector; and the method comprises:
introducing the composition into a cell(s) that have been removed from a host animal; and
introducing the cells into the same animal or into an animal compatible with the animal from whom the cells were removed or an animal that has been treated to be compatible.

62. The method of any of claims 61, wherein the animal is a human.

63. The conjugate of claim 46, wherein:
the conjugate comprises a RAGE isoform or domain thereof or functional portion thereof, and a second portion from a different RAGE isoform or from another cell surface receptor (CSR);
one of the portions is all or part of an extracellular domain of an isoform; and
the portions are linked directly or via a linker.

64. The conjugate of claim 63, wherein the CSR is a receptor tyrosine kinase.

65. The conjugate of claim 63, wherein one portion is from a herstatin polypeptide.

66. A polypeptide, comprising a domain of RAGE or a RAGE isoform or active fragment thereof linked directly or indirectly to serum albumin or other mucin.

67. The polypeptide of claim 66, wherein the RAGE isoform is an intron fusion protein.

68. The combination of claim 58, chimera of claim 53, or multimer of claim 50, wherein the CSR isoform is an isoform of a ErbB, a VEGFR, a FGFR, a TNFR, a PDGFR, a MET, a Tie-2 or an EPHA2.

69. The combination, conjugate, chimera, or multimeric compound of any of claims 46, 50, 53, or 58 wherein the RAGE or RAGE isoform and/or the CSR isoform or other isoform is an extracellular domain or a portion thereof that possess ligand binding activity or dimerization activity or other activity of a RAGE or CSR.

70. The combination, chimera, or multimer of claim 68, wherein the RAGE or RAGE isoform and/or the CSR isoform or other isoform is an extracellular domain or a portion thereof that possesses ligand binding activity or dimerization activity or other activity of a RAGE or CSR.

71. A pharmaceutical composition, comprising a nucleic acid molecule of claim 25.

72. A cell, comprising a nucleic acid molecule of claim 29.

73. A pharmaceutical composition, comprising a cell of claim 72.

74. A method of treating a disease or condition comprising, administering a pharmaceutical composition of claim 35 to a subject.

75. A method of treating a disease or condition comprising, administering a pharmaceutical composition of claim 71 to a subject.

76. A method of treating a disease or condition comprising, administering a pharmaceutical composition of claim 73 to a subject.

77. A method of treating a disease or condition comprising, administering a cell of claim 72 to a subject.

78. A method of inhibiting tumor invasion or metastasis of a tumor, comprising administering a cell of claim 72 to a subject.

79. A method of inhibiting tumor invasion or metastasis of a tumor, comprising administering a composition of claim 35 to a subject.

80. A method of inhibiting tumor invasion or metastasis of a tumor, comprising administering a composition of claim 71 to a subject.
